United States Patent Application Publication US 2024/0390433 A1 - sequence listing, part 2

SEQ ID NO: 1 - DNA, 4089676 bp, Bacillus subtilis (residues 2,044,839-4,089,676 of 4,089,676)
  source 1..4089676: mol_type = genomic DNA
gatcttagagttagagttgaatatacagggactgtttacttaggacaataataaatgaggggcgactagtcccttatcttatttttagttaaaaactatcttttattcaatctctatattcaacccagttgatctaactttgatttccctcatctctccaatctgtggcatatataaatgtttcttttcattagaaacaatttcacccttccaacaaccgttttgcacaaaggattttgtcccgattggtaaagtttgaagatctgcgttctctatgtattctccctcctctctataaatatctccttgttcagaaatcctccttttcgaaactttaatgtcgattttgtaaagtgaattttcatcctcaatcattaatttatatagccaatcagttatttttgattgctcttcactaccgttaaccatatcgaaaatcttcctgtacatgtcattcctcttcttttgaaaaatacttgtctcacctctttaatagttaaagtttcttgattttgcacttttccactcattaactatccacttcatatgtattcattaatttaatgataaaaccacgattttaatttaactttaatatgcaccatcttgagaaaatcccctttaattggtaaactcatacttaactttttatatacaagtgggtgttgccttgaataaaacaatcggaattgttggattaattatcagcatactagtgcaaactttttcggccgatgaatcgctatcgcataagattgctacggctttgttattggtatcaataatgatttataattttgaacatgctaaggattattctaaaaagtcacttgttattttaggagttacctttattcttttgatgctaggagtttatcaactgctctcatttaccagcgattactttgaaaagcttaatgtgaattttagatataccctcttatttgaaatagcattaattattgcattggtaacgattgcagtaaatgtaatgaagtacattgcgaatcggttaaggaaatcgactaatggtaaagagttatagctctttgccttttttatgctaaatgcttctttctatgcggtcttttatgtatgaaatcaaatgctaaatcaacttttctctggttccctttcctctgttactcgctgagtaacaacaataagttgaccgttttcttgacgatcaatactcttaactgaatatcctttagaaccgtaatattctccgataatctcatcaacgtggttactaagcagattcctctttatcacctgaaaaacctccacttattttatttttattctttattttttttatgatttcatcctataatccatctctccatttgccctctcctctatcacgacattaaccgacacacaatttccatatatatgggagtaatttcgctatttccccaacagataaatccatataatgtaattgtaagaaaaaattataagaatgggggatttacatgagttacaaaaaagtaataacaggtgttgcattatctgtaggtttacttgtttcagcatctccagcgttcgctgcaagtactagtcccgataaggaaatagtaaatgttgcaagtgatgattttaaagctcaagctatcaaatgggatctacctagtactactggtatttttgccaatacctttgaaaaagacggtatccgctggtatttaaaaggtattacaaaagtctcggaaggaaattggattggccactatgaaggtgtacgaatataagatcaaaatgggggggcatctagctccctttttaaattcatagtttgccagctctatctggttaaagtaatccttttaaacatagttcaaaagcacataccaattttgtatacatccccattaatacatctccctctctttaaaacagtctttttatcaagtgtagtgctactcataaacaacaaagacattatgatcatcaacaaacatttcgctgccatcagacaagtgtatccaaaaagcctcctctggttcatctctatagtcataaattgcgactacctttgtatttgattcttcactcactgactttctgacagttatttttatattatcttcaggcaaaataattgatttaatcattcacttcaatccaatcaaggtttgtattgcaccgttgtgcttcaagtaacatctagtcacaagattgaaccttattcgttaatacacttggtcccaacttttctgttctagcattagaaagacgcacttgaactttaacattcttcatttcggctgtaattgagtcaatccttccagcccaactaggactgtcttcaggtgtaggataaagtttaaatcgccaactaatctcacctggtttagaagcaaaaccttcgtaggtatcgtaatttccatatgaagatggttccggaagatgaacagcaagaatacttatattggttcttggagcactaggcggatttaattgcaccttataaattaatgccacgccttttacatttctaaggctctgatcaacaggttccattattacactacaaggcattgtacttgcttttacttgaattggataggcaacagcagcagccaataaggatataaccaaaataaatcgtctcatggagagttcctcatatttttttggttaatttcccttatttctggatcgattattcatatgtatttgatctggacttcaattttattttgatttaatttcaacagttaaactgtctggatagttttttaaatcaagtgcgtttacatgacagtgacctacattttcttctttatcaacgtaattatagaagaacttttccccattattgatgatgacttcgccatgatgtatgtactccatctctgatcccttgtaccaagttaccttaacctttgtgctaggtttgattttatttaaatcaaatactgttatttcttttagcaagttcatttttttaacctcctcttctcttttacttttaatctaattccctcatgtcctcctgctgctcaatataacttttaaagtcctcccattccctatcaatttctttaatattcctagcaatataggtttctgtaatgtctggatcaaccaacttttgaagagaaagttggtacataaattcaatctttgatactgtttctagaaatgactgggcataactttttgctctatttaagcgatattgactcattccatgttttgattcctttattattctcactcccttttaatcacattaaaatgcagcttttatttagacttcatcagcttgtctaatagtgtctaacaactctttcttcttgaaatatgtctttttccaaacgatccacttccttttgcaattcagtagcagcagcattcttcagaatccattctcctactccacagacttccttttgttctttctcaaacgtttttatatgttgatcttcgaacctaacccttactcttgttccgttttcaaattcattattaaaagcagctgctttcttttattcttcaagctgcttaatccttttgttgttgttaaatgagttacttacaatatttcctgattcacgagtagtacttataattaataatggaaagcttatatcacctttaggtcttaaaggtacgttgaggttttgactcggttagtaacttttggagaggagttgctgaccatctttttcattaaattaattgcatacagaaatttaataatggaggaatttagattgctgcttaatgacagagattgctgcttaatgacagagaacgttttttgcttgagtatcttcttgtttctaatcggatcaaatcgtcgtttgataccttctaatatactcactatctctgtcttttcttcttcaagaaaagctccaagaaaagatccttttgaaaattctggtttaaaggatctaggactatctatgagctcaccatttgatacaaatatactcagtcttatgtccttcgatgtcttacggaagaactgtttgataaggctagagctctacatagaaatatcggtgagcgtgtttactttttaaagtctgacgtctgcattttgtatcatgagtggatatcgtgacatccatttgctgcgacttcttttcaaatgaaatgaccaccgcaaaagaacagattagcaagcggttgtactataataaacacctaatggatacttattttaaaggaaagattgaagagcataatgtcattacggattgcgacattgataaggtgttacataagatgtacttaagatttggattcagagagtataaacgaaacaattatgagcatgtctttgatcttttgggtatataataagtcttatactgctttttagtaacaaatattggatttcgagtttttttcggctgactcacaaattcgaatgaaaatcaagggcaaaattaaaaaaatgaataattaagagggtgtataaggcttaatattattaatcgttaccgtaacagcaaaaaatgaatcgaagacttatttttatgcaaattggcgaatatcaataacgtcttagtcataatacttaataacctaaagcaaaggctgaatttatgaaagggttattttagatgggtacatataatagaagaaactcgtcacagataaatcatttagatggacggtgaggaacttaaataagctgcagaaggaagatatgaagttgttcaatatctccttaaaacaaccactttcccctactcccgcttatgttttacgatcgtttaccccctattcactaattaaagtatcaaaaatccttatgtttactgtcttttttagctcattataaatttttacgataagcatgttattcgtgtacgatatacgacttgactgtaattggtgacgatttaacagagatatttaatgcacttctaacttttttaactgcaatgggaatcattgttgacccaacaactcaaggtatttctgatagtgaacaagcaatggattatgataaaccccctccccttctcttaattgaggagggtatttttttcgtaatgaaaaaattgcagaaaactttacatccttttacaattttttcaatgactatgttatgattgttttcgagagatttttgaaattttcagaaagaggggtttggatgagtaagatcgcttcagaagttgtcgctactacactgaatgactggtacattgctataaaaaagcaaaaggttgatgagtcaataaaatattattcagagataaagaaactttttgatgaaatggaagaagatcaagaagttcttgcgtattatagtttattagaagaaagacataaaatgttgctacattcctcacgaggagaacctttgcaaaagcacacctattttactgaagacaatcaaaacttcattaaaaaaacaaatgataaattagaatacaacttttatctatttgaagcaatgtatgaggcatacaacaaaaactatgatcgagcaattaacttatatggattagctgagaaaaagcttgcagaaattccagacgaaattgaagcagctgaattttactctaaagtctcttacttatacactcttgttaaacaaagcattgtggcacaacattatataaaaaatgcaatttcgatatataagcgacaccctgattacaaatgcaaacttgctacatcaacaatgattgcagctgcgaactatgctgatatgaaacgatttgaggaagcagaaaaatattacttagaagcaattgatattgcaaaagaaacaaaagatgaatttttgaaagctcaattatttcacaatcttagcatcgtttattctgattggaataaacctgataaatgcatcgaatctcttgaaaaagcaataggaaatgaatcttggttacattcaatttattatataaattctttattcatgataattaaagaactctttaaaattgacgaaaaaatgaaagccattaatttttacaataaagcacaggaaagactcatattaatggagaataaagtatacgaagccaaaattagcatcttatacaacctttattgtggtgaattaaaaaataatttcaataattgtattagtaatattgagtttttaaagcaacaaaatgaacttgaaagtgtagatgaattgtcctacatagctgcaaaaaggtttgaatcaataggtgcttttgaagaagcaacgagctttttcaatgcgaaaatttgggctgaacagaaaatgaatcaggtggagggaatcttatgaaaaaacttgtgctttgcgtatctattttagctgtgattttaagtggagtagctttaacgcaattgagtacagattcaccatctaacatccaggtagctgaaaggcctgtcggaggttaaaaaaggttgattaattaatttagccctactcatacacttgagtgggcttttattttatgatttatgtccaccagtcaacccagctctgtgaagcgctgtacctgcaaacgtaactgagatatttctcactgttttgcccgagtaaaacttattaaagaacatcaagcaacacttataaatatccatcgtgatatttgtgggaaaatcaattgttttggatcgatgaaatccaccaccaagctcatctttactgtaaccaattccaaggctgatcgttcgaccaactttattatgtgtacatgcccttcttgcgacttcctcacaaatttccaaaagaacagccttaatctcttctctccttgtataatccctcagtaaaatctgactcttatcaaaactaatctgaccttgcatcaactgagcacctatttctgataaatcaattccatgcgcatgatagtacaactggtttcccattattccgaacttcttttcaagcagctctaaaggaaatttagctaactggcctacagttgatatacccatccgattcaggtttctttccatcctccctcctattccccatattttagacagtgaaccttccagagtttatttggcacatcttcatatctccaacgtgcaataccactctttgttttcttactctccaggtcaagcgcaagcttactaagcaacatattgtcaccaattccaactgtgcacatcaaaccaaattctctccacatgctgctttggattgctttggccatttcttcaggattctcttttcctgcatctaaaaaagattaatcaattgaatacgtgtggacacatttttcaggaacaaatctgtaaaacagctttgtaatctcagttgaaactctgatgaaaagcttcatttgtggatttacaatgtatattcttggatcttcaggtatctcaaatagtctcgatcctgttttgattccaaaatcttttttaagtgcaggagatgcggctaatactacacttacctgtctctcgatatttcttacaacagccgatacagaagtataaaacacaaagtatattcttacgtagaaattgtgagtaatcaatcattgtatgtaactccttgttatatatactgtgttgttatgttgatctttaacgtgaagcttgtgttgttcaaaattaatgtaatgaactcttccggcggcattttcaaacaaatccatagttgtaaagtttgaatttcaaaatttaagtgcttcagaaacgagaacgtccatcatctcaatttttgatccatcaatcaaatcttgtttaagctgtattaaatgttctagcatcattgatgtccattgattgttcctcgatccctaaacatatcgactcactccttgattgatctaatatcaacagaactaatgttccttattcaatgcagataagaacaaacgttcgatgtaaatgttggtaataaaatataaaggtcaataatgatatccgtagtattaataaaggagagattcttttcgacgagggagagtgtgatggtgaatgaagaagaggttaattggatttttggtcttagttcctgctttgattatgtcgggtataactttaatcgaatcaaacaaaaagacccctgtagaagttttagaaagtgcttgggatgaatttgggttatttagttttgaaattggaataacagatccggcaattacaataggcatggatcaaaccaaaagtgaagcaaaacttcgtgaatatttaaaagataatctgtctagagaagccaaggaaaaatataagatttatatattcaaggacgatattgttaagcttgagaaagagcatcaagaatatttgcaagaaaataatctcaataagtaaaacgcccagcacttattgagctgggcactgtttcatatttaaattgaatttttataagcattaatagcttcgtttcgcaacaacatattatttttgttaaccatgcctatgttgtaagcttttttgataatatctaatacctgtgaatctaatgcagagagattacctcccggattaaatcttgatttccaataatctaaagacttatttaggtcaagtgagctttttttgttctcgggtttaactacttcatttttctcaagtttttcacagaattcactaaaactaattgatgaaagagtaggattatcccctccatacccttctgtagccaaactgcaaaatgctaagaatttcggatcataaataagatcgcttgagtttacattcatcacagataatcacaatcctctcagagctttttataattgtattaccttttccatttttacacatgttaaatatcgacaatccctcaaatcatttaataaggttatgtcaaattttaatgttgataaatacgcaaaaataaaaggaaaccatagttccaagtaccttttaggctttctaaaccaatttttacagcgtttagtccctttttgacaacagttgtgtttgaacctttttctgtcgtgcttttataagcatttgaaagtttactaaaagttgactctaaagatttaatggacaaatcttgaatttcttggctaacaatcttcatttacaattctcacttttcgttttaaaaacaacacctactcaatagttgaatttaggactacgccttgaattttgcgattcgcaaactatcatatcagctacagctttaaatgtttttcttagcttcaccatttgtgaccttagtcccttgtactctttggctcttttatccgcttcagagagcaatgaatcagcttcaaataccttcatttcattctcctttcaagcctactctatgtaaatttcaccacaattatttgcttgaataacagaaaaagacagccagaactgactgtcttatacatcgtgcgatcgtgttctataataattttctgcggtatagtagcaccattcccaaaaagttgccccattggattctatataccgatctagaaatatctcaaaatttaaatttaatggtgtatattcccctatttctaatataaaaagatagttgggatcccctttatccaatttatctttgtcgatcatcaaatggcacccttctaataagtgaccaattgggataccattgatgccttcaaacaaatcctcatattttaattcttcttcaatctcttcaaggctaaataaataaagtcctccacctatattctccccatcagaaagaatttcaaaaattttcgcaccgttatgtagtgtcatgaacttctgataatcctctggaagggtaatctgatgtttagcttcaaaactttgaatgtcgttaagggttgctttgtcctgtgaaaatgtaacaaggaactccatgatatctccttcagaacaaaacaattgaatggctcctttttcgtctaaaagacttttcaagccatttacagtcttatgaacaaagttagtcacatacatcacccctttatttccttttaacaataacctttcaaattccaaaagatgtgaacagatcgtgataggtgctcttttcagtgaatataatgcaataaattctaaaaagaggtgcctctaaaaattgaattctctaatgaatgatgacatggtaaagatcattagaaatggccttagcgcatcccagcatccaaagcatattcttgttgtaggagctggattgtccgggcttgtatcagcatcattgctgaaaaatgccggtcacagagtaacgattctcgaagcgagcggcagagcgggcggccgtgtctgcactttgagagctccctttagtgatgatttgtattttaacgctggcccgatgcgcataccgaataaccattcgttaaccttagaatatatcaaaaaattcaaattgccaacaaatgtatttctcaacagaaccccgatggacatcatttatgcaaatggaatcaaaacacgtctccaagtttttgaacgagctcctggaatattgagatacccagttgcaccaaatgaacaagggaaaacatctgaagagctgatgctttctttactgcagcctattctaaattttatcaatcaaaatccagcgagaaattggcggattgtcgaagaacaatacaaaaatcattcgttaagctcttttttaaacacgtatttttcatatggcgcgatcgatatgatcggtgtacttttggatatggaagcgtatatggggatgtcccttgttgaagtattgcgggaatctatctttttttcatcgcccgctcacttctatgagataactggcggcatggatctgctgcctcacgcgttgcttcctcaattaaaaacaaacattctataccatcaaaaaatgatgaaaatttctcaggggaaaaatcgtgttacgatccattgtcagcatcaacaaacggcagaattcacatcattcacagctgatctcgctattgtaaccattcctttttcaacattgcgatttgtaaaagtcgaaccataccattcattctcttactataaacgaagggcaatccgtgagctaaactatatcagtgcaacaaaaatcggcatagagtttaaaagccgattttgggaaaaagccgggcagcgcggcggcaaatctattactgatctaccgattcgtttttcgtattatccaagcagaaatattggagcaaatggacatgccgtcattctggcaagttatacttgggctgatgaggcactgatatgggacagtctttcagaaggagagcgaatccagtatactttactgaatttatctgaaatctatggtgatattgtgtggtctgaatttgtgtctggcacttcttttagctggagccagtacccgtattctgcggggggatttacagctttcgaaccaggacaagaattagagctgtatccctatattcctgtccctgagggcagagttcatttcgccggagaacacgcctcactcactcatgcgtggatgcaaggcgcgattgaatctggaatacgtgttgcttatgaggtcaatcgcttaccttagatcatgctcacatcttgttaaaactggttgatataaaaagaagtgaagaatttatactcctttgtttaaaagattaattcaaatatgggatgtctcaacattcagttctttattatttttatacacgttttgaatgcggacctcccttttcttccataatcattaataaatacccaaccatagaaaacgttttaattaaccatcgggcgaactttctttcactgtataacgattcttaatgttgcttttttatcctttacttgtcctctctttttttcattgacttacatttcttgaaaaccagtataaatcctaaaggaattttgtaacaaatacagaattggaaagataagcgccaaaagaaatgctaactccttatctcaaagacaaaactgcgcttatattaaaagaaagaggtgtctttagaatggttcattttaaaaactgccctgatccttctctaaacgccaattctcagtctcaccccgaattttcatccgaattagaacatattaagacaagaatgcaaaactttattaagcactcggttacagcccaaaatatcgaagttactgacgcaagggtgacggccgaaggagaggtcacctctcttttaaaagaacgtctcgacaaggaatattataggcttttatctaaaatcacccgggaagtaaatgtggctgacttcggcgctgttccagatggaagagacaatactgaagcttttcgaaaagcaatcgggaatggccgagtcaaagtacatgttccagcgggagaatacctcgttcaagggattaaacttccatcttggacaacaattgttggacaaggtaaagggatcacagtgattaaattgcatgaagacactccagcgcatgaatgggtgattacaaatgatgattatcaaaatggaaatcgcaatatttttgtccaaggaatgtcattagactggaatccaagtagacaatgcggtgtgagaaatccagggggacagttctccagttgtttaacttttgctaaggttgaatatgggtggatcaaagatgtggaagcgattaacgcaggtcttcatggtattgatattacatcgccaacgtatgaccatttgcctgataccgattggacaaaagacggatcaagatatatttggatcgataactgtgtgacatatggttcaggagacgacggcattaccacccattatagcgaatacatctttatttcaaactgccattcaggaaatccgcggggaacagaatttgctgaaggtgtttcaaactccaacggaatagaaattgacgacggctctaggcatgtgtggcttttgaataactttacaagcggcaacatccgcggagttgaagtaaaagcccatgaactgtggccagcctctcaaaacgtccatatcataggccatatttcttatcgcgatgttcgtgcatttgatcttcgtcatattggtcaccatcaaattacagatcctgaaagcacaacagcatacgatgtcacactcattgattgttcagcagttgaaccagttttcaactcgctttacgatgctgtgaccccaagagcgctggttatttcggcatataaaaacgttaatgtaagcggattcacagcgattggtgatccagactatgattataaagaaaaccctgtcgtagccttgcaatatcgcagccaaaatataaccattaatggtattaaaattcgcggttttaaaaaagccggtgttgatattaatttatcaggcggatcaaataaaactgattatattaaaatttcaaattttgatatttataaatctgctccaaaaggaatttcaatcggtggaggcctctacaatgtcaatattctaaatggaacgatgattactgacaatgggacagttgcaattcagtcccccaataatcaggccacaattctcggtgtacaatcagaaggttatagtgtggcagcctcaatcaaaggccaaacataccaacaagttccaatcaatttgaaaggaggcatacagcttgcaacgacctctggctttgccgttaaccaaacaagcgcagttatagcaggtaccggcgacattacggcccgcggagaaagaaatgcggtcattagctcttctggaggctccagtactgaaggctctcgcgcattaatcgcttcttcaaataacgcacatattagaggaaaccaagcgtcaagaacaatactgtcttctgaaaatattatacttgaggaaccatacaccgtggcaggaggtcatcaatcaataaagtggcttcttgactctgttcggggaaacgggacgtttgccggtgcaatcagttcttctttaggtggatatggagagtattttgagagttcaactggacagttaatccatactggtacaatcgtgactttaagaggtgaaaaaattgtgcccgcgaatgttggagattatatgcttggcgttatttcagaaacttcagctttcatttcaggagcctccagtttcgtctggcagggccgttatttgacaaatgagttcggcggatttatttatgaaacggtgactgatgaggaaagcggtgaactcatacgtgttcccaaacaaaatccagactacgatacagcgctggaggcaaattatcattcacgggcagcaagagacgaatggcacgttgtagggttggttggccaacattatgtgcgtattgacgaaactgtcaatcaaggagattatcttacggcacataatggaataggaacaaaagccactgaaggaagctggaaagtaatgaaaataacctctgcttacacatcagaaaaagggtatggtatcgctctaaccgtcatcaaatagtggatacgccgaccagttcaatatatgtttatccaaataattagatctcttttctaggttctttattccttgtatgttattatcaattttcaatatctaccaaaacacccctaatatactatcgtaattaacttatattataatcaaaaaaattttgacagctgttccttctcgttattcatgaaagttgctattgaaatgagtaaatggatatcatattagacttctatagcaaatacaccatatatatcctttaagtatttacaaattgaaaatgtttcatgaggcttattaaaagtattgttcttttatcatctgtaagtcgatacaaattgcattaagatcacacctaaatcacactgagttttttcttacaaaaaaatgaaaaccctttccattctaaattcatttcaccgttactaaaagtaatccttgcattccttcgcccttcatgctatattcatatagcgatgagctgaattgtgtaagtcgatgtacatgcctttacggcacacacgaatgtggcgtgtggtgcatcgcctcaatacgcaaagacgtttgccttaggcaaacgtcttttttgtgttatccgatttttgtgccgtttgaaacaggctgatccggctgcaaaaggacgacatcgccctggccgggtatgccgccgaggaccaagacttccgatttaaatccggcgatccggcggggcggaaagttcacgactgctatgacttgcttgttgacgagaccttccggctggtaacgcttcgtgatctgcgcgctcgattgttttatgccgatttctgtcccaaaatctattacaagcttgattgccggtactcttgcttcaggaaattcttccgcttttacaattgttcccgttctgatatccaatttctcaaagtcttcaataactgccatatcaataactcctttttctcctattgtaaaggagatatacaatattcttttaactaaagagccatcattttttatccgaatataaggtgtttcgatacaggcggggcggcattcctgtgcttttcgtgaaccatcttgtaaaagaagaaaggttttgaaagcccagcgcctcgctcacgacggtaaggttttcatttctctccatcagcattcgttttgcttcctcaaggcgaaggtcggcaatatagttctgcggggacttccctgtctgttttttgaaccagcttgaatagtaagctgggtgataatgctcgatttctgccagcttcttaatcgtcagccgctcaaataaatggctgtgaatgtatgcaattgaggcatagctatgggattgaagcttttcttttatgtattgtactagcatatgaagcgagttggctgttccggcctttgcttcctctgtcagcaagtacctgatcgaagaccagaaaggatcgagtgcagcttcaattcccgatcctgcacgatactcatcaattttcattgcgtgaagcggaacatccagtacaagacattcatttcttccgatagaacggaagcgatgctcgcactgcggcggaatatataaaaaatgatccggatttaatttcacctggcgcccctcagtctcaagatctatactcccttcaagcggaaaaagaaattggctgtacgcatgcttatgtgaatgataaaggcgtgtgtatgtccgtttttcgcaaatcatctcttgaagcgaatccatcagcaacccccttcctttggtcatcttttaatccggtaatggtgttccgatataggcgaaaatccgattttttcatataaagaaactgccgccagattttctttcatcacttgtaaaaacatgcgttccgctccgttgttttttgcccattcagtcaacatcctgatcacttgggttcctgccccttttcctctgtgctcctcagctacaacgatattactaagtccgccataaccatcaatgacagaaaccgtgccaagcgctgtcaggctttctttgtcatacatcttgaaaaaagttttacacggcggcatgcgttcgaatatgtgtttgtaacctttgtgacgttcgggtgaaaacccttctaattgaataaattcatctatccaaacagatgatggctcttgttcccacttgtatgtaaatcggctgttgtcatttgttcggctcataattgaccggcacaacgctgtcatctggaagcactcgtctaccttttcataacggctgtctgccaatgcgtcatcaagccctttcggtgatgcgttgctaatatgaaaacaaacaggtaagcctaaactttgataaaaaagttcggcctctagctgaaaatccccttcaggcatatccgcagacgtccatacgctatttgcccttttggttacgccaaaattcgctctgagaagccatttccctatgcttttttgaaaataagccggccatgaagctgccgctaatcgttcaatcttgcgaatgtcatccattgcataatgcctctcccctatgtatactcccttgatattatacaatattcagaaatataagacatccatttatttgtttacataatatttttattgtttattaataatcctgacaaaaatgtccgaattgaaaatgacaggctttctaaaatgtcctcctcacgttcaaatgcttcttttgcgattaaaacagtaaagccatgcagcagacttctgagcccccttgtcgcatgaatggcagtcttttcacttgcatagccgttttcaatgagcagcttcgtcacaagacagacaatttggtcagagacgatttccgtccgtttgtcgtgaaccttaagaagagccgcttcataatatccgggattttcaattgcaaaatcaacatatgcatgagctaaagaaagcatcgcggaatctccctttcgttcggttacggagtccgccatttgatcaaaaagctttgtcagtcctctgacagcaagttctgctctgatcgcttgcagcccgttgatatggttatacaatgacggggggcgaacattcatttttttagaaagtgcggcaagtgagacaccatttaccccttcctgatcggcaatctctgctgcagcgtctacaatcattttttgggtcaaacctattctcggtgacatgctcatcatcctttctttgctttttggatcgcctgtctcatccgctctgaaggtgatcgcaggaattttccatgtccgacagcgagacaggaaggcgccttatctgcgagcaattgtgcacttttgatggcctcctccttattccatgtggcgaaagcgggaaaaggaaacgtccattttatctggcctgatacagcgattcctccgtgcaactgaaacgcatctcctgctattaaagtgccgtttcttgtatcaagaaatgacatgctgcccggtgtatggcccggtgttggaatggcaagcagagaaccaattgtttcaccgcccgtcagcagttggtgaggctttgtttgtatgtgtttcggaatacctccttttataggcgtctgcggctcatcttgccgcaaggatgtgtcaccttggagcaagaatgaatcccgttccgagatcatgacctttgcatgcggaaatgtttgtgccaatgtatccagtgatccgacatggtccccatgtgcatgagtcagtaaaatatgctgaagcggttttccaagctgattcacagcttgaataatccctttatagctgcctggcagtgcggcatcaataagggtgacttcgttttcttcctctactaaatagcaattaaccggaaacaatgctggaaaaaaagtcagctgccaaaccgtttggtactgagtcattctcatctttttattcctcctaacaaaactaatggcgttagttttattattaactaacaccattagtttttcaagagtttattatttttttatcgctacataaatgttaacttgtgctcgctgtggcactgcggcactttgatcatacatctcaaaatcacctgtaaacgtgcgcagatgccgcttatcccaagtccaaatttccttccacgtttcaagcacaatctcttcaataggaccgattctggaagtgaaaacggcgtaagcggaagccggcaaatcaatgttttcatatggtcccggaagaatgtcgtcgtattcctgaaacgttccgactgaaaacgtataaaacccattcgtctcttgttcataattcgaatataaggcaataatgcttttgtctttttcagcctgtgataaaagagcgctcatatcctgcttccagaattggtcccacagtgccggaatcctcctttcttccgtcatttccagtgcgttgcttgtccgttgtgacagtccggcaaatcgtttccggtctaagtgtgttatatgtgaaaagcccatacgatctcctcctttttttaagattatagacaaagaaacctgacagcagtgtgtcaggtttcatatattttttgcatgtgatgaatggtttcttttactttatcccgtatatgaagaggctgcagaacctcaatatcctttccgaactggagcaaaaaaccgatcagccatggatcttctggaagtgaaatcactgcccggcagatttcatcttcctcacaacagtgaaggacatcatatccgaaccattcacctatgcgctgacgtgctgacggctgaacaagaataaccaattcagttaaacggtccttttggtaccaactcttatcccatggcaaagtgtccagctgaatgtcttttctgataaatgtctgatgtaagatagccagatctttcatccggttcagtttaaaaaagcgaaaatcatttcttaccaggcagtaggcatataaataccagtgccccgccttgcaaaccaatgtataaggttcagtttcccgaagtagtgtttccccgcttgcgcttgtatatgtaaaagatatcgttgacaaccgatcgatggcagcgctgattttctcgcgcagcgtcttttgatcctcagtatggccccaagccgtcatgtcaataaaccatttttctgtttggtgcttaaatgcttgagtagattgttcaggtataaggtgtttgattttttgataggctgtgctgtgagaaacgggttcatacatagatgaaacgctttgcaaagcagaagcaattgcaaacaattcctcctccttcagccactctctttcaagccgatacgtttccatgatgccaattccgcccccggaaccctgtgaggtcacaatcggaataccagccctattgatcgtctcaatatcacggtaaattgttctgacagatacttcaaacagctcagcaagctctgcagcctgcacttgttttttgctgatcaataacacaaccatcgctaacaaacgttccagtttcattctgcgcaccttttcttcttgtattttccaacaaaacaatcataacattttgataaagcttgggcatatctattatgcggcggaatacacctcgcatatgctatgaaaaaaggggtttccccttcttttttgtgttcagtatttatttcagctactatttccgaccggataagcatacacttctcaacggaggggatttcacatcatgcatcttacacttcagagcgtttatcctgccatgatcatcatcttttttctgtataaaaaaattaaaaggtccatcggataccagccgctgaagccccgctggctgttcacccgtatcattcttttctcgctgtttgcttttggactttcaatcttcagcgccattcacccttttttatatggatatctcattttgggcattcttggcggatggctccttgtctttttcgctaagaaaaacatctcttttgaaaaacgcagaggaaagatctattttcggactcatatttgggtagaaatgattctcctaaccttattcctgtcaagatttctatatcgagtgacagagctttatcttacctcgcctgatctaaacagccttggatcttacggtcagtcaatcggaacggaccctctgacaataggcgtcttttttctgatagccgtttattatatcggtttttcttcttttgtcatcaagctcagcagaaacgaactcgaacagcacggacacaataaagaaaaagacatccttgcccgctagcagcgagttaagcaaggatgtctttttcaatcatgctgcgtatgatggatcatttgctgaagaacatctaaaacatgttcatcctccggagagtaataaatcgatgttccttctctgcgcgatttgacaagccgaagatttttcaaaaatctaagctggtgggacacagtggattgcagtaaattcagcttttctgcaattccgtttactgcatgctcaccctgggacaataaatggagaattctgattcgggtaggatcagaaagcgctttgaatgtttgcgcgactagaaacagcgtctcctcgtccagatcagcagccgattgttccgtttctctaaattcagtcatatgtatcacctttctttattcatagttttatcttataacaaatgcgcttgagtgcaaaccagcctgcttgtattccatttcaatctcatagtttaaatttatgtttcaaatcaggtttttacttggtctgatataccgtcttatgtcataataaaaaaggtcatactgctccaaacattgagggtgaaacacagtgaagaaaaagagaaaaggctgtttcgctgctgcgggttttatgatgatttttgtctttgtcatcgcctcttttttattggtcctgctttttttcaaccgggatttaatcaaaaaacttccgatcgatacgaaaacgattgttttggaacgtttaaccgattacaaacccttggtggaagaagagcttgaaagccaaggactctctaattatacatcactcatattaggcatgatgtatcaggagtcaaaaggaaaaggcaatgatcccatgcagtcctctgaatctctggggttaaaacgcaatgagataacagaccctcaactcagtgttaaacaaggcatcaagcaatttaccctcatgtacaagaccggtaaggaaaaaggcgtggatttggataccattattcaaagctacaacatgggggcaggttacattgattttgtagctgaacatggaggaacgcatactgaggaattggcaaaacaatactccgagcagcaagtcaaaaaaaatcctgacctgtatacttgcgggggaaatgcgaaaaatttccgctatccgtattgctacggtgattatacgtatgcagaaaaagtaaaagaaaaaacaaaaactgttgaagaatctttgcaggttgcaacacttgaaaccatggaatccaaggctcatgaataagagtctatcaatttactgacaaaagcccaaaaatgaatttgggcttttgccatgtttacacgtaaaaaaagccatactgagtatggcttttaataatacggtgaaatcatcaaatatacaataacgcctgtaaggcttacatacagccatagaggcattgtccatctcgcaatttttttatggcgctccacctgcatgctgaagcctctgatcagcgtaaacagcgcaagcggcacaataattgcagaaaggcagatatgtgtaattaaaataaagaaataaatcgggcgcataataccttctccgccatagagcgtgttttccgcaatcgagtggtacgtcacatagcaaatcaaaaatagtaatgttgttgtgaacgcagccaaaataaagcgtttgtgagctttgatatttttctgtttaatcataatcagcgcggccaataagaagataaacgtaaagctattgaatatcgcattcagcattggcaaaatgtgaatattcgcatggctgaactgatctaatttaggcataaaaaacagcactgcgattaaaccgttaatcagaactgtcagcgtaaggacaatccccgtgtaatttttcggtttattttctgtttggttcatttggtgacctctcctaatttgtactggctatccaaatcgtatgcaaattcaaagaagatgtcaacggtttcgattgcttcgtcagaaattagacacacttcaaaggccggaggctattagccccggcctgttaggtttacgcctcttttatcaaatgttcaatgaccttatgttcattttcattcagcaggttcttttgaattttcgaatgaatgggtttattcatatgctgatccaagatatcggccgtttctttatccccggcaataaccattcgttcccatcttttcgcggcagctttttgatcaaggctggcagccagccgcttatacagtctcgattggttctctgttacatgttccctcatccggttctcttcaaatggtggcgctttgtctacagcggaatggctattcttccaagactcattgatcatatcatactcataacgctccaccgcctcaatttttcctaaaacggtttcaataattttcacttcatgctgctgagttaaaataaacgccgtacttgggtatgcctggcgcaaacccttcagctgatccaggacagctgtttcttcccagtaaaatcttgtatctacagggacttgaagcttaataggctcccatatgccgctgtcggaaacaaaaaacacgagactgcggggcatgtcttttcccattgcattcaagtattgattcattttagccctgattccatccagacacttttcctcctctggatcactagctgccaaatactcttttaatcggctgaatcctgactttagggcaatcttccattctcccccctgctgctctggatctctcatgtctgtattgagatacagagagagaattttatccggcggttccaattggacatactgtaatttgttaatcaatgaatcaatcgccattccgattcctcctttttcacaggttagttttctttttcctctcttaaaaacgatcaaacctgactttccgctaatttctagtaataatggaattgttgtttacaatacgcctctcttctaatacaattggtaactgtgtttctaagctgatttttgaaaggagtttgatcttgtttactattaaagaaaaaaatcgtcaagagcttgaagaagaattaaatgatttagaatttcaaatttatcgcatgcaggagaatatgaaggatttatctaaagatgccaaagtgcttggtattgatcaatcgaaacatgatgagtggatgattgtttcctcgattgatgatggccaaacatgcaaaattatgctaactgattgtaaaacggcttaccgaggaaaaggctgtttttcacttgtagcgtcttacaaggacgatgccattcatataggcgatataaaaggccctccgaatcacgggtttggttccatttgcatgaaatatttaaaagatatagcaagagaccacaatataccgaaagtcacaggagacatcgccaaacgggattggaatcatgtagaccggctgattcacttttatgaaaaacatcaattcaaagtatgtatcgatcatgatacccaatccggcagcattaagtgggttgatttgtaaaaaagtctggaagaaagagccaagatatgctgtaatggtaaaaaaccattgatggagggttctatgtacgcctcaaaactgaaaaagggagacgaaatccggatcgtgtctcccgcgaccagcatgtctatattatcaaatgaagcaaaaatccgagcacttaggttatcgggtaaccatcgctgaacacgcaaatgaatgtaatgaatttgattcatcctctatcgagtcaagagtccatgatctgcacgctgccttttttgatccaggcgtcaaagcgattttaacgacactcggagggtttaattcaaatcagctgctgcgttatcttgattacgagaaaatcaaacggcatccaaaaattctgtgcggctattccgatataaccgctctttgcaacgcaatttatcgaaaaacgggtcttgttacgtattcaggcccccacttctcaacatttgcaatgaaaaaagggcttgattatacacaagagtattttctttcttgctgcgcttcggacgacccgtttgaaattcttccttcaagtgagtggagcgatgaccgctggtttttggatcaagaaaacaggcgtttttatcctaataacggccctgttgtaatccaagaaggttatgcggaaggtactttaattggcggaaacttatgcacgcttaatttgctgcagggaacggagtattttcccgaaacagaacatactattttattgattgaagatgattatatgtcagacatccatatgtttgaccgcgatctgcaatcactcatccacctccccgctttttcacatgtaaaggcgattttgatcggcagatttcagaaagcatcaaacgtatcaatggatcttgtaaaagccatgatcgaaacaaaaaaagaattatccggcatcccgatcatcgcaaatataaatgccggacatacctcgccaattgccacgttccctataggaggaacatgcaggattgaagctatttcgggtacatcacgaatatggattgataaacattaatcagcttgtaaatttttttacaagcttttttagcgcaatcggttatgcatgccgcacgagacatgacaaatgtcatataggaggcatgatgtgtgctactacaaaagacttctctcattagcgtatactgaaccgagacacacaatgagaggatacttactatgactgaacaaaccattgcacataaacaaaaacagctgacaaagcaagtcgctgcatttgctcagcctgaaacaaaaaacagcctgattcagcttttaaacacgtttatcccattcttcggcctatggtttcttgcttatctcagcctcgatgtctcctatcttcttacgttagcattaacggtgattgccgcaggttttctgacaagaatttttatcatcttccatgactgctgccatcaatcttttttcaaacaaaaacgctataaccacattctcggttttctgacaggtgtcctgactttattcccgtatcttcaatggcagcacagccattcgattcatcatgcaactagcagcaatctggataaacgcggaacaggagacatctggatgttaacagtaaacgaatataaagctgcatccagacgaacaaagcttgcatacagactttatagaaacccgtttatcatgtttattctcggaccgatttatgtttttctgatcacgaaccgttttaacaaaaaaggcgcaagacgaaaagaacgtgtaaacacataccttacgaatctggcaattgtcgcgttggctgccgcttgctgtctgatctttggctggcaatcgtttttactggtgcaaggcccgatatttctgatttcaggttcaatcggtgtttggctgttttatgtgcagcatacctttgaagattcttattttgaagcggatgaaaactggagctacgttcaggctgctgttgaaggcagctcattttataaactcccgaaactgcttcaatggctaacaggcaatatcggttaccaccacgttcatcatttgagtccaaaggtgcctaactataagcttgaagttgctcatgaacatcacgaaccattaaaaaacgtaccgacaatcaccttaaaaacaagcctgcaatcactcgcgttccgtctatgggatgaagataacaaacagtttgtgtcatttcgggctataaaacatatacctgtaagccttccgcctgattcaccagaaaaacagaaactgcggaagaatgcctgatgataaaggaggtcttctaatatactagaaggcttcctttttattgttggagggtgcattctggctttcacaatgataaagttacaagtaagatgaaaagctgaaaatgaggtaagatcatgattaaaaatcattttacatttcaaaaactaaacgggattacgccctatatatggacgatatttttcatcctccccttctactttatatggaaatcatcatctacatttgttattattgtcggcatcattttgacgcttttatttttttcggtatatcgatttgcttttgtctcaaaaggctggaccatttatttgtggggatttttattaattggcatttcaaccgcctccattaccctgttcagttatatttattttgctttttttatcgcgtattttattggaaacattaaggaacgcgtcccttttcatattttatattatgtccatttaataagcgcagccgtcgcagccaatttcagtctcgtattaaaaaaggaattctttctgacacaaattccttttgtcgtcattaccctcatcagcgcaattttattgccctttagtataagaagccgcaaggagcgcgaacggcttgaagaaaagctcgaggatgcaaatgaacggattgcagaactggtaaaattagaagagcgtcagcgaattgcccgcgatctccatgatacgcttgggcaaaagctttctcttatcgggttaaaaagcgacttagcaagaaaattgatttacaaagatcccgaacaagcagctcgtgaactgaaaagtgttcagcaaacagcgcgaacttctttaaatgaagtaagaaaaatcgtttcctctatgaagggcatccggctcaaggatgaactgatcaacatcaaacaaattctcgaagcagctgacattatgtttatctatgaagaagagaaatggcctgaaaatatctcattgctgaatgaaaacattttgagcatgtgcttaaaggaagctgtcacaaatgtcgtcaaacacagccaggctaaaacttgccgagtagacattcagcagctctggaaggaagttgtgattacagtgtctgacgatggaacattcaaaggagaagaaaattccttttcaaaaggacatggcttactcgggatgagagaacggcttgagtttgcaaacggaagccttcacatcgataccgaaaacggaaccaagcttaccatggcaattcctaataattcaaaataaacataaaggatggcttatatgattagtatatttattgcagaagatcagcaaatgctgctgggcgctttaggatcacttttaaacctagaagacgatatggaagtcgtaggcaaaggtacaaccggccaagatgctgttgattttgtcaaaaaacgccagcctgatgtatgtattatggacattgaaatgcccggaaaaacagggcttgaagctgctgaggagctaaaagatacaggctgcaaaattatcatcttaaccaccttcgccagacccggttactttcagagagctattaaagctggcgttaaaggctatttgttaaaagacagtcctagtgaagagctggccaacgccatccgtagcgtcatgaatggaaaacgcatctatgcacctgagctgatggaggacttatacagcgaagctaaccctcttacagatagagaaaaagaagtgcttgaacttgtggctgacggtaaaaacacaaaagaaatcgctcaggaactcagcatcaaaagcgggacggtgcggaattatatctcaatgattctagaaaagcttgaagtgaaaaatcgaattgaagccattacccggtcaaaggaaaaaggctggtttaaataaaaaaggatcttggcatctgccaggatcctttttgttaacctgaaattccagtttgagaacctcgccgcaaccagaattaaattgatcgatatcctcgctcctatacccgctgaacgattgcttgattaacagcccaataaaagactggattgaatgatatccctgttaaaatggtcggccattgcacatcagcagaatttctgatattgattattttgtattttcagtatgacaaagttgtgccacttcgctcccgaagctgccatgcccaactgcaagagcttaatatcacaataaaaaaccgtctgaaatcaatccgattccgttccgtaaatggcatctgctacatccaactgcttattatctgccaaaaaagatacaacaccagctcgtttcgctgatcaaagatagtaacaaccagctataaatgtcatgatgccgaatgtctctgtaatgtggaaccaatcttttaacccgagagcccctgaatcgcacataaagagaaaaacgggaccactttcttttatcagcatatgatataaacagctctaagcagaacaaaaaaagacacaagccaaaagctcatgtcttttatcacaatctatattattagtttaagactttaacacttacagttttgacgccccaattagaagcatcacttttacttggtacaaatacgtcgattttatttcctttaatagcgccgccagtgtctgctgctgttgcttccccgtagccttcaacatagactttagaacctagcggaattacattaggatcaaccgcaataactttcgcattcgggttcttatttaagtcaatgcctgtagctgtaacgccggaaatgccgccgtcgttagcagtgtaagcagtagcagtaactgttagttcttttgaagcttcttgattatttgtatttgattgaacagccttctcctctgtgttaacagaagtttctgcctcagcctttgtttcttgtttaggttgctgttgtacagcttcttgtttaggttgctctttttgcacagcctcttgttttggtgcagcttgaggtgcgtttgtttgcgcattctcagtagctgtgtttgctgctgttgcctgaccttttactgaaagagttgatccagcatagatcatgtcagagcttaagttattccaaactttcaggttgttgactgtcgtgccgaatttttgagcaatcttagaaagcgtatctcccgctttaattgtatattgcccagtcgtggttgtttcttctgaagaaatggtcagtttttctcctgcaatgattttatcagaagttaacttgttccattcttttaagtcctttaggttcactccatttttctgagagattccccagagcgtatcacccttttgcaccgtaatttcttttgcagaagcgtgagctccgaatgcagttgttgaaagtgcagcaactgccacaaaggacataatcgtcttcttcataagtaaatcctcccttgttagctttttattggcggctaacaggtgatatcgtaacacacgtaaatgtcaaatcaataacaaaaagatatgatttagattacagttcctttacatgaaggatttctctctgatggaaagacttgctgaacccttgatataataggcttcgcaggtctttttattttgaggcgaaacagagaaaataaaatgtgttttttatagaaaaaaagattgtttttctgtttttttagtctgtcatccttgcataagcttgtatttcttgtaaaaaaagccggccgtattttgctcttttttgttctccgactccttttatagacaaaagttcatcatcatttacgggctgttttcctgacatttcttttaacgtttggtcagagaaaacaacaaatggcggaacaccctgctcagccgcaatttctttccgaaccatgcgcaatcgttcaaacagctcgtcattttcagtaatcgaggccgcttttagcgcttcttttctcgttactgataattctcctctcagcacattccttcctttactgctgacaaaaagagtcggaaacgttccgtctgacatcctgatgaaatcgtcagaaataagaaattcgataaaatcactgatttcccctacggattgatgttttaatatcccatatgttgagagatcggcaaagccgttttcaagaacttttttatttttagatccggcgagcacttgggcaaccatcatcttaccaaagcgttccttcatgcgaatcatacacgataagaccatttgcgcctcccgtgtcacgtcatgagccatccttgtatcagtgcagtttccgcactgtccgcacgcatcaggctccttttctccgaagtacataaggataaaacgctgcagacagtcttccgtgtgacaatagtcgaccatttgcctcagcttttttaaatcctgcttttgtttctcttcatgttctgattgttcaattaaaaaacgctgcactataatatcctgcggtgaaaacaggagaacgcactcgctgtcaagaccgtcccgtccagcccgtccggcctcttgatagtagctttccatatctttcggaatttgtgcatgcagaacaaatctgatatttgatttatcaatgcccattccgaaagcagaggttgccaccatcacttgcagctcatcattaagaaacctttcctgctgctcttttctcacatcatcagccaagcctccgtgataccgccctgcattgacccgatttctttttaatcgctcataaatccggtcagcttcttttctggtcgctgtatagataatgccagcttcatgtttgttgttttgaacatactcgtcaataaaacgatccttattttctccctttgctactttaaaggttaaattgtctcgggaaaatccggtatatacggtgttttctttttgtatgtgcagctgtttgcagatatcctcgtgtacctcaggggttgctgttgctgttaatgccatgatgacaggattgtcatgtaattcacggaataaaatttcaatatttctgtagcttggcctgaaatcatggccccattgagaaatacagtgcgcctcgtctattgcaaccaaagggacatcaatgccctgcaaaatccgaataaactccggtgacgttaatcgctccggtgtaatgtaaaatagcttataggccccttctttaagcccagtcagcctttcatatatttcctgactcgattgtgtgctgttaatgtacgcggccttaatccccgcttcttctaacgcatcgacttgatccttcatcaaggaaatcaacggcgaaataacgatcgtagtcccttcaaacatgagtgccggaatttgatagcaaattgatttgcctcctcccgtcggcataatgcagacggtatttcgtctttcttccgtcaccgagcggatcgcttcttcttggccattgcggagcttttcataaccgaaataatgggccagaagggattgggctctatgtaacataacgtataaacctcgcttttccttgaatttcttccatcatatcataaaaaaacggtcttcatttcttccacacagaaattgaatttttgctataccaaacctttttaaataaaataaaaagccatttcccaaaaggaaatggctttcgctacgtcttgccgtatgcaagtaagaaagttttaaaccaccactcctcaaagtgggtgtttgcagaaacgttcctgtcgtcctctgcaatggaggcatgacattccggcttcgatataaaactccctattacagcttaaaggttaaaacttaattaacaatacgcacaaagtagcttcttttatatagtacaccatcagcagctttttatcaagagaccagaacaattgtttagaaaaactttttccagccgataaaaacgatttttcgctattatatccggagattcgacaagtcaaaaatatattacaataaaaaaacagccttttttcgcaaagaggattcatcactttcttctattataatatgtatacaaaaaaactcctatcgcccaatgataggagtctttgtttcattagaattttgcagcaagatcttttgcttcttgtaaacctttttcaatgatttcttgcgcttgatcaggtgctgcgttatgtccttcgatgacaactgtgtgcaagtcttgaacaccccagaaaccaagaactgttttcatgaagtttaatgacatttcaagtgcagccattggtccttctgagtagacaccgccgcgagcgttaagaagcgcaacttttttgcctcccattaaaccgactggtccttcttgtgtgtatttgaatgtaacgcctgcgcgagacagataatcaacataagtatgaagcactgctggcactgtgaagttccaaagcgggaatgcgaaaacaactttgtcagcttttacaaactggttcagatatttgtcagcaattgctgcttgttttttctcatcttctgtcatttccattccttgacctgctttaaatgttccgttaatcatatctctgccaaggtaaggaaggttttccttatgaagatctaattcaaccacttcatcattagggttgttttctttataagcagctaagaaagcttcgtaaagtttagttgaaacgccttcttcagctgtacggtcgcttgattttacaaataaaactgtagacatttgtattcctcccggtaaactttttatatttacttacaaatagtatgttactttcttttttacgtaaagtcaatcactttattttgaatatgagattttttttcaaaaaaaagcaagtacatctaatatcggtgtacttgcttgccatttttacttcgaatcttgttcacgatccaagatttcatacgtctgcgagcttttttgatcaattgtttctttgttggataagtcttttacctgttcatgaaactctctttcataagaaggagcatctgtctccagatcatcctccacattagcttgagcctcaactgtcattcttgcatagggaacagcttcaagtctttcgtaaggaatgtcttggccggttttttcacacacaccgtaagttccgtctttcatcttttgtaatgcacggttgacctcctctaacagctcccggtcaatctctttcactgtttggtctgtcatccggtctgtgacgagcgtcccgtggtctgccatatggttgtcaaccccgttggaaagctcccccacttcttccgtcattgattctgtttcctttttctcgccagacaattctttttgcatatcgagcaatttatgatagagatgctgtgtttgttcttttgtcagtgccatgtatatcctctcctttctatcctgtttcccgttttgccttctgtcaaacatggaaacatcgatggaaagaagctactgcctttttgaacggatcgtgaccgctggcgtcgatggtgcttcgggttttcgttggcactttttgtccttctcttctggcggtatataataggttgcgcctatatttaatctgccgctcagttcatcaatggtcagctcgccgaattcaagatgatagtcaattttttcgacattcagcgtttcaatatgtatataggtttcttcagactcctgtttgctgctttgtttttgtttctcaatcactgagagtctttcttcacattcacgcagtttgtcaagttctggtttcaagcaaagcctgatcagcgaccggaacatttttttcatgacatcacgaccctttgcatactcctctttcgtctacatatataatgaggtatataccatagaaaggagaggttttcatgcttccgactaacatcaatatttctcatctcaagactaactcgataggcaccggctcatcccttacctttggttctgcggagttaaggaacaggtgctctgctatcaaaagaaataacggttttggggaacaaaatgcagatgttattgttatggtcattccgattgaatcaattgatgaccgtgatggagcagatgcactcagtatgaaaatcaatcatcaataacaatggttttcgcttgaccttcgtctttttgaatagtgatgtataggattccgtctttaaaaatggcattcatctttccatgaagatgatcggaaagctgaattttcttctcaaaacttccgtatttcccttctttttggcgaaagtcctgttcattaaaataggaaaagcgctgccccttcaccactaaataatctccgtacgataatatgtgaacgtcttgtttacggtagcctggaagataaattaaaaactgcacttccgcaacggtatctacaatatccatgctcggaaatgaagcatctcctttccctcgctgatcttgctgcgcaaacggaaacggagattggccatttgtcataaaaggggttttttggtcttcatcaaatacctgtttccaaaagtcaccgccgtacatctgctgtgcgaattccatccactgcttcatcttttcgaaatccatttgaagccccctgtcttaacatactttataaccgccagcatacaactatagaaaggaggtttgcctgtggttcaaccaactccgtatatcaatattaatattttcatgctgaaaattaattcctttgaaaatgcttcagcggttaacgtaggacaaaatttattggcagaatggcaaaattcagataaaaaaaatcaaggctacggacagaattttggagatgcgagcggatttatgggcacgagaagccatgtggatgacagagaccaaattgattctccggcctcttttgaaagtgaagcggttaactcctcaatcaaaaggaagtgatgagatgttcttttcaccctccgtcgtgaatgtcggcggatttaaaatcaatacgatggatcgaggttcctctttaacactcggtccgtatcagcaggtcgattactttttatcagctaaaataaatcaagggtttggagaagaaaatggcgactttactcctcttgtcgtaccgatttcaaatgtattagatgcagatcttgttgattcgaactcagcgaaaaacagtgtggtgtaataagaacagggcgcacatgccctgttttttttataaaaaaaagcctaaccattttttgaacggctggctcatcaaatattcagctgcacaaatgctttgtcagcaccgcctgaacctcgcttaaatcggtgtctttcgcaaattctaattcgaacgttttgcttcttgtcatcaataaaagcccagtgtccggatcaaacattcccgcttcttgaatggcaaagctttcaattgttttatatggaagaaatacacgaaccttctttttggaaaacattttattgtcaaagaaaatgatccgcttatttgtaaagcaaatttggtccactcggagcttataaatcgattctattctttccccttcaacgagcaaagcctcaagcttctttgcgtccgttgatctgctaacagaaaaaatacccaatgaagaacccctctttctgcatttatctatttgttttatcattcactacataaaaataagtcctttatccctatataagaatacgacatagaagacatttaaaccattacgaacagattacatttttcaaatttttgatttgttttttggcttttaagctgttgtcatcaagtaatacgcacatatagagaaaaaagtttcaatattcagcaatgtttttataaaaaagcggtttttaatgatttttttaattttgttttatatttcctgttttaaccacaaaaaaaccgcagctgagctgcggttttatgtatcgactgcttttaacaaaatctgtttgatgcttcaaggaagcattacatctcttcgaagtattctttataatagccgccgactttattcgtattgtcgaccacaaagagaaactcctctgtttcattttttacttcatattcttttcccggcgttaaaacgcggtttacgatatatttttttgcgtttgtctgcacacactttacttttttaattgtttctttttcaagccaatttttatgaatcatgatgaaatctccttttcttatctataagcttattgtagcttttttcttttgtaaattgcaatatcggttattcattgattttgccttgatttctattatagaatgtttgtatacgcttacgtttgaagcaactatcacagcttatttctgctattcaatccaggaatcaatgtgctatcaccaagaatctcagaacagaccataaaaaatgactggaggtttgttacggatgagttctttaacgatgcaagtgacgaaaaggctggagacatttttacagggaacaaagaagctttatattgacggaaagtttgttccgagtgcctcaggggcaacctttgacactccaaacccggcgaccggcgaaaccttgatgacgctgtatgaagcccaggctgcggatgtggacaaagcggttaaagctgcccggaaagcctttgaccaaggtgaatggagaacaatgtctccagcttcgagaagcagactgatgtataagctggcagacttaatggaagagcataaaactgagcttgctcagcttgaaacacttgataatgggaaaccgatcaatgagacgactaatggagatattccgctggctattgagcatatgcgctattacgccggctggtgtacaaaaataacaggacagacgattccggtttccggcgcttattttaattatacgcgtcatgagcctgtcggtgtcgtcggccagatcattccatggaatttcccgctcctgatggcgatgtggaaaatgggcgcggcacttgcaacaggctgtacaatcgtcctcaaaccggctgaacaaacaccgctttcagctctttatttggcagaattaattgaccaagccggtttccctgccggtgtaatcaacatcatcccaggattcggtgaagatgcgggagaagcgctgacgaaccacgaagcggttgataaaattgcctttaccggttccactgaaatcggaaagaaaatcatgtccaccgcagcgaaaagcattaagcgtgtgacattggagctgggcggaaaatcgcctaatattcttctgccggatgcgaatttgaaaaaagccatcccgggcgctttaaacggtgtgatgtttaaccagggtcaagtctgctgtgcgggctcacgtgtcttcattcataaagaccaatatgatgaagtggttgatgaaatggcgtcctatgctgagtcactccgccaaggagcgggacttcataaagatactcaaatcgggcctctcgtaagcaaggaacagcatgagcgcgttctttcctatattcaaaaaggaaaagatgaaggagcaaaagcagtgaccggcggaagctgtccttttgaagcaggatattttgtcgcaccgactgtgtttgcgaatgttgaagacgaaatgaccatcgcaaaagaagaaattttcggacccgtgctgactgcaattccgtacgaaacagtcgatgaagttattgaacgggcaaaccattcagaatatgggcttgcagccggactatggacagagaacgtcaagcaggctcactatatcgcggaccgacttcaagccggaaccgtttgggtcaactgctataatgtgtttgacgcggcgtctccatttggcggttataaacagtcaggactcggacgagaaatgggatcatatgccttggataattacacagaagtcaaaagtgtatggataaaccttgaagactaacatgtatatttaaaaaactgctgcctgccagcagtttttttctttctgtaatggcggtaaaagacgctgaatatatatgcttctgaaggagttgagcgtgatgggcacacttcaggagaaagtgaggcgttttcaaaagaaaaccattacggagttaagagacaggcaaaatgctgatggttcatggacattttgctttgaaggaccaatcatgacaaattccttttttattttgctccttacctcactagatgaaggcgaaaacgaaaaagaactgatatcagcccttgcagccggcattcatgcaaaacagcagcccgacggcacatttatcaactatcccgatgaaacgcgcggaaatctaacggctaccgtccaaggatatgtcgggatgctggcttcaggatgttttcacagatctgagccgcacatgaagaaagctgaacaatttatcatctcacatggcggtttgagacatgttcattttatgacaaaatggatgcttgccgcgaacgggctttatccttggcctgctttgtatttaccattatcactcatggcgctccccccaacattgccgattcatttctatcagttcagctcatatgcccgtattcattttgctcctatggctgtaacactcaatcagcgatttgtccttattaaccgcaatatttcatctcttcaccatctcgatccgcacatgacaaaaaatcctttcacttggcttcggtctgatgctttcgaagaaagagatctcacgtctattttgtcacattggaaacgcgtttttcatgcaccatttgcttttcagcagctgggcctacagacagctaaaacgtatatgctggaccggattgaaaaagacggaacattatacagctatgcgagcgcaaccatatatatggtttacagccttctgtcacttggtgtgtcacgctattctcctgttatcaggagggcgattaccggcattaaatcactggtgactaaatgcaacgggattccttatctggaaaactctacttcaactgtttgggatacagctctaatcagctatgcccttcaaaaaaatggtgtgaccgaaatggatggctctgttacaaaagcagccgactttttgctagaacgccagcataccaaaatagcagattggtctgtcaaaaatccaaattcagttcctggcggctgggggttttcaaacattaatacaaataaccctgactgtgacgacactgcagccgttttaaaggcgattccccgcaatcattctcctgcagcatgggagcgaggggtatcttggcttttatcgatgcaaaacaatgacggcggattttctgctttcgaaaaaaatgtgaaccatccactgatccgccttctgccgcttgaatccgccgaggacgctgcagttgacccttcaaccgccgacctcaccggacgtgtactgcactttttaggcgagaaagttggcttcacagaaaaacatcaacatattcgacgcgcagtgaagtggcttttcgaacatcaggaacaaaatgggtcttggtacggcagatggggtgtttgctacatttacggcacttgggctgctcttactggtatgcatgcatgcggggttgaccgaaagcatcccggtatacaaaaggctctgcgttggctcaaatccatacaaaatgatgacggaagctggggagaatcctgcaaaagcgccgaaatcaaaacatatgtaccgcttcatagaggaaccattgtacaaacggcctgggctttagacgctttgctcacatatgaaaattccgaacacccgtcagttgtgaaaggcttgcaataccttaccgacagcagttcgcatagcgccgatagcctcgcgtatccagcagggatcggattgccgaagcaattttatattcgctatcacagttatccatatgtattctctttgctggctgtcggaaagtatttagattctattgaaaaggagacagcaaatgaaacgtgaatcttatcaaacggaaatgttcaattggtgtgaagccctaaaagatcagattcaaaagcgaggtcagcttgaccagtttgaagatcaaatcgacaagatgattgaggctctggaagatgaccaaacaacagaagaagattggtataaacaggccgctgccctttatcgggatattacagaatcagatgatacaagtgaaagacgcgcttatgtccctatagggaaacacgtgctgccaaagcttccttacaaatactccgccttagaaccttatatttcacgcgatattatggtccttcatcatacaaaacatcatcaaagctatgtcgatggcctgaacaaagcagaatcagagcttaaaaaagcgagagcaacaaagaattatgacttaatcactcattgggaaagagagcttgcgttccatggagcaggccattatttgcacagtattttttggttttctatgcatccaaacggaaagcggcgtcctacaggagcattgttccaaatgatagacctttcatttggaagctattccgcttttaaagaacattttacccaagccgctaaaaaagtggaaggcgtcggctgggccattctggtctgggcacctcgatcaggacggctggagattttaacggcagaaaaacaccagctcttcagccaatgggatgtaattccccttttaccgcttgacgtatgggagcatgcctactatttgcaatataaaaatgaccgggccagctatgtagaccactggtggaatgtcgtggattggcgcgaggcagaaaaacgttttgagcaggcaaaagaagtcgtttggaagctctattaaaaaaagccccctttccccgggggcttcgtgttttaaaaaatccctaccacatgcaaaaacacgatgatgatggcaacaggagatagatatcgaatgagcagcagccaaaccgcaaaccactttcgtttgagattggaaccgcttttcagctcgtcaaacaaatcctgtttcggtatttttagcggtacaaaaatcgaaatcagtaacgcacctaacggcattaaaatattgctcacaagatagtcggccgcatcaaaaatagacagatgaaatatagagacgtcacttaagacaccgtatgacaatgcagacggcacaccgacaataaaaatagcaattccgcctaaccaagcgaatcgttttctcttattgacatcgcctttcgaaagtactgcgaccaaaatttccagcattgaaaaagcagatgtcaatgcagcaaataaaaatagaagtaaaaatgctaataaaaagataattccgaacggcatttgattaaacacagtcggcagcacgttaaataacagaaccgggccttggtctggtttgaggccgaatgaaaagacagctggaaaaatcgcaattccggccattacagcaacaagcatgttcataacagttacagatacagcggactgtaccagattttcctgtttctctaaataagcgctatacgttaccatgacagatacaccgacacttaataagaaaaaggattgtcccattgcatataaaatggtattggcatcaattgcagttaaatcaggcatcaggaaaaatttgattccttccatcgcgccatcaagtgtaaccgagcgcaccattaaaatgatgaataatagaaaaagcgccggcattaatacttggcttgctttttcaattccgctgcttaccccttttgcaacaactaaaattgttaccaccataaagagcagctggcctcctacagccaaataaggatttgaaatggtacttgcaaatatcgtatcaaaaccagatgtctgcgataaaccgccagtgaagccttttataatataaattaaaatccatccgccgacgacactgtagaaagatagaagaataaagcatgtcaccatgcctaaataaccgatccaatgccacttcgttcctggagcaagtgttttataggactgaacggcatctttctgtgttcttctgcctatgatgaattcacctaacaataaaggcagtccgattaaaaccgtaaataaaataaaaataagtaaaaatgcgcctcctccgctggttccggcgacatatgggaatttccatatcgcaccaagcccgatagctgatcctgccgcggctaaaataaagccgagcttcgaagaccattgatttgcttccttcaccgtatcactcctatttgatctaaccattataaaagttcattgtaagaatatcttcctatatagtcaagaacattttgattagtttacatcttatatctatatacatctgccaaaaactaatattgaattattcagaaaattatttataataagagaatgttatgaaatttgtaagaatttctgctgaagttcttgataagtgtgttaggagtgtttttatggacatcattagaaaaataagtcatttcgcaggacaaacctttggcatatgggtcattgtttttgcagtgctgggattttctttcccatctttatttacgtggatcagttcttatattacgatttttcttggcattatcatgtttgggatgggccttacactgcaagccgatgatttcaaagagctggtcagaaagccttggcaagttattattggagtaatagctcagtatacgatcatgccgctcgttgctttcggcctcgcatttgggcttcatcttccagctgaaatcgcagttggtgttattcttgtcggctgctgtcccgggggaactgcatctaatgttatgacattcttagcaaaaggaaatactgccctttctgttgcggttacgacaatttctaccttattggcacctgttgtaacaccgttgttgattatgctgtttgccaaagaatggcttcctgtctcgccggggtctttgtttatctcaattttacaggcggttttatttccgatcattgcaggtctgattgtcaaaatgtttttcagaaaacaagtggcaaaagccgtacatgcccttccgcttgtttctgtcattggcatcgttgcgattgtctcagctgtcgtcagcggcaatcgggaaaatctgcttcaatcggggttgctcattttttcagttgttatcctgcataacggtatcggttatttacttgggtttttttgtgcaaagcttttaaaaatggattacccgtctcaaaaagcgattgcaatcgaagtcggcatgcaaaactccgggcttggggctgcacttgccacggctcatttctcaccgctatcggccgtaccaagcgcaatattcagtgtgtggcataacctttcaggttctatgcttgcaacatattggtcaaaaaaagtgaaaaagaaacaagctggatccaaaagcagcaatctatcactttaaatatgcatcaaaaaaggtacatcactttatcgtgatgtacccttttttattatccttctaataaaagctgttcaggatcttccagtaaatttttgattgtcacgaggaagccaaccgcttctttaccgtctacaatccggtgatcataagataaagcgagatacatcatcggacggttttcgaaacgctcttcatcaattgctactgggcgcagctgaatcttatgcatgcccagtataccgacttgagggctgtttaagatcggagttgacatcagtgaaccgaaagtccctccattggtaatcgtgaaggaacctccctgaagctcgctaagggttaatttattgtttcttgcttttttcgcaagctcgccgatctctttttcgattcctgcaaatgtcaggcggtccgcatctcgtactaccggtacgacaaggccttcatcagcagcaacagcgataccgatatcatagaatttcttaacgatcaactcatcgccctgaatttccgcattcaacagcggatattttttcaatgcagccacgaccgctttcgtgaagaaagacataaagccgagcttcacttcgttttgctcaaagaattgatctttgcggcgttttctgagattcataacagccgtcatgtccacttcattaaatgtagtcagcatcgccgatgtttgctgcacctctacaaggcgttttgcaatcgtttgtctgcggcgtgacattttttgcacttcgacaggtttatcaaagctttgctgtgcttttggagcctgaggctgctgcttttgctgaggagccggttttgatgccggtttttcgtacgcttcgacatcctgcttgcgcactcttccaagcggatctccagttggaacttgagacaggtcaattcctttttctctcgccagcttacgggccgacggagaagcgatcgttcttgattttgcttcagattgtgcttcctcgctcacctcttgtgcagctggttcagcctgtttctcttctttcacgctttccttgctttctgctttctctgtaggagcaggggcagaactttcacccgcgccttctgaaatcgtaccgataatttctccgacctggacggtatcacccgaatctttcaatacctcttgaagtacacccgattcttctgctgtcaattcaacattcactttatccgtttctagttcaagcagatattcaccctgttctacatagtcaccaggctgctttaaccattgggctattgttccttctgagattgattctgctaattcaggtaccttaatttccgccattttttcatttcccccttagtttttgcgagtcaagctatcagatacaatacgttcctgttcttttttatgaactgtcggatctccctctgcagggctggatcgtcttcttcgtccaatatattgaacgcttactccctctggtgcaatctctgtcaaatacgggctgatataaccccaagcccccatgttctgcggctcttcctgcacccaaacgatttctttcaggttcggaagttttgcaaataactctttgactccttttgccgggaatggatacaactgttcaattctcgcaatgtgaagccactctttaccgtcttctaacttattaaaatgatcactgatgtctatagacactttaccgctggataatacaagtctggttactttttcatagtcatgagaaagtcccgactgttcataaacaggctggaagcggctttcgctgagctcctgcacttccgacaccgtatttgggttgcgaagaaggctcttcggcgtcataatgacgagcggtctgatttcttcacgaagcagcattttagcctgtcttcttaaaatatggaaatactgtgccgcgcttgtcaggttggcaaccgtccagttgttttctgctgcaagctgcaggaatcgctcgattcttccgcttgagtgctcaggcccctgtccctcgtagccgtgcggaagcagcatgactaatccggatttttggccccatttcgcgcgtccggcagaaataaattggtcaaaatacacttgagcagcgttggcaaaatctccgtactgcgcttcccacaaaacaagcgtttccggtgaatgcacgttatagccgtattcaaaaccgagaaccgatccttcagacagagggctgttatgaacagcaaatgatgtgctgcagtcagataagtgatgaagcggcacaaattcttcgcccgtctcactgtcatgaagcacaaggtttctttgggcgaacgttccgcgctcggaatcctgtcctgttaaacgaatcggtgttccgtctttcaaaattgaagcaaacgcgagtgattctgccaaagaccattccacttttctgtcatcatcgaacgccttggcgcgtctttctaaaatgcgctttagcttgccgaaaacattaaatgactccggccagttgatcaattcgccattcagcttgcggagcacatcaaaatcaatcgaagtgtccacatctgggaaaccgtttgatacaggctctggaagttcaatttcacaggcagtgtgttcctttttagacggaactttctgatatgcatcttcaatgcgcttcgttaccgatttttcgatgttttgaacgacttcctcggtaagtacgccttcttttaccagcttttcagcgaaaatttgtttgacggtcggatgctttctgacagcatcatacaacattggctgagtggttgacggttcatccatttcgttgtgtccatagcgtctgtacccgatcaaatcaatcagaaaatccttgttgaatgtttttcggtattcgaccgcaaacttaacagctgaaagacaagcttcaggatcgtccgcattcacgtgaacaatcggaatttcataacccttggccaggtcgctggcatattttgtcgatctggattcagcgctttctgttgtaaatccgatcatgttattggcgataatatgaatcgcaccgcctacttgatacccttttaaagaacttaaattcaatgtttcagctacaattccttccccagggaatgcagcgtctccatggattaaaatggccagcgattttgtttcatcttgtaccgggtatccgctttgtgttcgcgtttcctgtgccgctcttgtgctgccttcaacaatcggattgataaattccaagtggctcgggttgttcgctaacgtaatgcgcgctgattttgtttcagcgtcttgaagctcccgattcgcccccaaatggtatttgacatcccctgtccatccgtagctgattccaattgatccctcagacgggacaagatctttattcggcgcatgctggaattcagagaagatgatttcatacggtttgccgagcacatgtgccaagacattcaggcgtcccctgtgcgccatcccgatgttgacacttgtcgtgcctgatttgacagattgtgcaataatgtcatcaagcactggaacaagagcgtccagaccctcaatggaaaagcgcttctgcccgacgaatgtgcggtgcaaaaactgctcgaagccctctacttcagtcagtctttccagcacagccgacagcttttcagctgagttcttctggaacagctcgccagattcaatctttcttgtcagccactcgcgctctttgaagtcatgcacatggtcaaattcaaaagagatggttcttttatacgtatttcgtaaatactgaatggcttctaaaccgttcgtaatgtttttaggagcgtctttgcagatgacagacgcaggtattgcttttatttcctcttctgttagcccgtaatcggataatggaaaaagttcgctctttttctcatcctttctgagcggattgacggaagcgttcaaatggccataggttcgaatatcttctgcaagtctgactgcggatgcgatcttttgaatcagatcggctgtaacacgtcccttttcttttgttcccgaggcctcttttatatcgcttggcggagcaccgagctcgtcgaacatttccttcaaatccgggtcaatgctgttcggatcctgggtatactgatcgtaaagctccagcgcatagccgaggttcggaccgtaaaaatcttcccaattcattcgttgtttcatactattttgaaacatttgaatattacccccaacttaaataatcaagtgatcgattcactatcttgaaataactttcgaacgctgtgtccaaaattatgtaataaaaacgcttccaacgatattttaccactgtttgcaatttgattctaccttgattgttcacaaaatagtaaaaaacctttataaaaaacaaaaaatttaatcattcgaaaaaacaaacgccaaaaagcataggattaagggctatcctatgcttttatgaagcagttttttcagcagcggatacaaaacatccggtagctgatcaacatccgggacaaatatactgaattttccgtacatatcctgaatcgtcttcatttgcgattcttctatttctgagttggagagaaaaacatttatcacttctattcctctttttcgggcttcgataaccgcctcacttgtatcgacgatcccattttgttcgtagccaaatgcggccggctctccatctgagaaaacaattaagaacttttgcgcctcgctgcgatgcagcatttttttcgtcatctgcctaattgcgtacccgtcacggttatcttcttctggctcaagctgcataatggccggtccagaatcttgtcttaatgatgattggaagggaataaccgtattgaaatagtttggttggcttgtttcggttgcatcatttgtgtcctcccagaaaccgacaatctgatgcggaaccgctaccgatttcaacgcttcgtgaaacagcacgattcctcgttttgtttcgtccattttgtcgaacatgctggcggaacaatcgaccagcaatgtaaaaactgcgtcgatttctgtagacggttcttgctttttgtagaacaggcgcggatttcgctcagtgaagtaacgaagaagcttattattcagtctcccggcatgaagatctgttctcggcaatgtttttttatgctccagcgttttttgaatcatttgtttcaaacgcttttgatacgattcaatcgtttttgcctgctgtttataagaaagctcctcttcactagttgccggctgcggttctttataaattggaaatgcatatttattttctttgccgtcagccatacccgctccgttcggctggtctttttgagactccagcgcttccagcttggaatagtctttccgtttcgtatgtctggctgatccttgaacagagccaagggcctgatctccatcgtcgccttcccttgaagcatcttttcctaaatctgattttgcgccgtgttcaatatcaaattgaaggaagcttttagacggtgcttctgtttcccggtgccatgtcggcatttcttcttcatggatatcctcatcaccgtctgatttttttggaagcgtgatgtcatcactcagcttcggcgcttttttctcttcttcaaataacggctgttctgcagcttttgcgtagtcaagctcaggcaaaaagaagtaggtgttcaacatgtctttatcgagcacctcttcaagtccgtccatgaggtcctcaacaattttcagaacctgccgtgtcgaatctacttcatacacacgcaagagctgctgctcaataaacgggcgcatcagatcgatatcttcacgcatggatggaagggtctcgagcggcgattccgctgtgagcttgacatagatcgcgcaaaagagcgcatcggtaaaaatgcttcgttccaaatttaaggtcagctgggttgagaaatgttttctgtacatgtcttttcgcttcgcaaatacatgtttcgtacccggacgctcacgtttgatgcattcttcgatcctaatgtcttcaagcagcataaagagctgcttggcaaaacttttaaaggtgagatgacgatggatatcattcaaaaagttcgcaaactcatgcagcgagctatatcttgttccgactgaacgcaggtagacgtcgcttttcagacccgcttccatgtcctcagctgccctgtctttccaaaagtggctcatatagattttcttttcaaatggattgtaataggactgaacgccatactccacttctaccgcttcactcttggtgagtgttttggccaaatcagtcagcatcataaataaaaatgaatcaatcgtgctgtcgttaaatttgataaatttcatcgcagccccctcattcaaacagagtttctgcaatatttcggacggccgctttttcccgatcatcatcaagcttttctacaattccccgctcaatggcacgacgcggcggaatataagcagctaaatcacatgtatcgattaaagctctgatggatgccgcttcttcagacacctgtccgttattggcctgaacgatcaagtcagaggaaagcgtgataaatctgtcaatcaatttctcgtctttcaaggctgactgagacatgagcacttgtttcagcagctcgcctttaatataaggcacatcaatgatgacaaaacggtttttcaacgcttcattcagaggaacagttccgacatagccttcattgatggctgcaatgactccgaaaccgcttttagcccgtatgacctcgcctgtaaacggatttgtcatcatttttctgtaatctaatacaccgtttaaaataggcagtgtttccggcttcgccatattgatttcatctatataaagaaaatggccttccttcattgcctttgtaacaggtcctgaaacaaactcgattgtcgcctggccagattgattttcaatcgttttataaccgaccaatgcctcagcatccaagtcgactgaacagttgacgctgtgcatcggtttatgaaaatagctggacaatgtttctgccaactttgtttttcctgaacctgtaggccctttcagcaggacattttttcccatggctaatgcaataatggcgtcaaatagaatggcttcatcctccgcctcatagcctgatgttcctataagcgattgaaactccggggaaataggctgctctttatatgataaaagcttttgttgtatatcttccggcaatgttaagtgctgtagttgtgttgtcatagacagattccctttcctattcatattccttaacgagtatactaaaaaagcccctgtatgctcaatacaaaagggcttggatgatattactgcttctcgttatttcccaaaagggctccgcagacaatacgcgcaccggaattgccgcttgggtttgtcagataatcgtccgcttgttcatgaataataaatgcacttccgtcctcgtcgagaatatttagtttacttccttttttcagtgaagtgtcaggcgcattcattatgacatctacctttccatcagcaccgacttcaaggttcggcagatctccggcatgatgccccatcggattattgaagccgtgttctttgttcagtggattaaagggaccgcccgctgattcaaaatccggcctgacacaagaacctttctcataaatatgaaaaccgagagaagcacctggacgcaggctgtttgcggaaatatgaatatcgaggccttcatcatctgattctttgatctctataaagccgactgctttcccttcacgattgaccaactggacatgatgaccaaacgctgacgtttcaaccacttttttttccggcacccggttaggagggtctggaggttttttttgtccgcatccggcaactcccagtgccgtcagcatcatcaacagcaagagacggtacatactgtctcccccttgttttttctaacagtgtggtcaatcattgtctggtataaacaaaaaagcctataaaaggctttttgtcatactcatttttaaaaataacttcttgcgcccaagtaccgctgtttccaatacgaattgctgagattggaaatgtcgacgcccgatgagcttgcatgaataaaatcaccgccgcctagataaatccccatgtgagacgggccggatttatatgtggtaaagaagacaaagtctcctactgacggctggctgactttctgcatgacattccaataccctgccgtactcaatcttgatatagatgatacattattaatgaggtaataaatgaagccgctgcaatcaaaaccggcaggcgtgtttccgccccatcggtaaggcactccgacatattttttcgcttccgttatcattctgtcaatcttcgagcctatttgaatgtttgaccctgagttatcttttggctttgttggctttgtcggatttgaaggattagattttgatgctcccgaaatagtcagaacctgcccgatttgcaacacatccgatgataaattgtttttatcacggatgctttggacagtgactccgagccgatttgcaattttccacagcgaatcgcctgcttttaccttgtacgtcgttgtttttgagggattggagtttgacggcttttttgaaccgctgtttccgctcttcggtgagctgcttccttttattttgagcacctgtttagggtaaagtgtatctgatgttaagccatttaaggtttttaattcagctacagtcatatttaagctgtttgcgattttccacagtgagtcaccaagcttgaccgtatatgtactttttgaagaacctgaagaattggaaccgctgtttttctttgatccatttgatccgcttgaactgcttgtccctttgatcttaagcttttgccccggacgaatcaggtcactgctcaggctgtttaagcttttaagctcagaaacactcattttatgatttttagcaatcatccatagggaatcaccatatgcaactgtgtatgttgatgttttgcttgaattagatggggatgtcgtgctttttttgctgctttcaggaaccttaagactttgtccgacataaagcaccgttgatttcaatttgttttcggatttcagagctgatattgtcgtatcatactggcgggaaagtttccaaagagagtcaccgctttttacttttatcgtttttgcttccgcgggtgctgcggccatcgacgacccaacaactgcagaaacagccaagccggctacaatcttctttttcattcattcaacctcctaaactgttttttgcaaaaacagctagtattttgtttccaaaaatggcacgcaactgttttatcgtcaatttttcagcaagttaaacccttttcaaacatttggcagcattttcagcatcgttcgacctttaaaccttcaaataaacatctaacattttacataagcacgatatgtttttcgaaagtctaaggaactatttaagcgagggtaaaaatgatggttttctattgatgaacgaagcagtttctcctcctttcttgtctatttttctaatcaattctctatcggcgtgtcaaatccctcttatgaaatggcaaaaagcctgttctttcgataagaacaggcttttacactatgcatttgctgattgagttttttgttttacagcttcaagaatgctatcggccgcttttttagagccgcctgccgctttcagtgattgtccaatttcttttgccttttcagcatacgaaccattattcattacatcttgtatcgtctctttcagaaggctttcagataattcttctttttttaacacttttcctgcgccgactttttccacctgatctgcgacaacaaattggtcgcctcccatcggaatgacaacgagcggggtttcaaaatacaaaccttcacttgtgctgttcattccgccgtgtgtcacaaataagctggctcttttcaagatctcaagctgagggacatacgggcgtacaatgaaattctccggaatgtcgtttaactcacttgttttaatatgcttgccgatggaaagcacaactttaccgtcaaagtccttacacacttcaaggcattgattaaaaaactgcttttgattattaaaaatggttcccattgaaataaacagcacgttttcattgtcaatctgatcaaatgggaaatcattgtttccggctctttctgtaatggaaggaccgacaaatacatatcgctcgccaaattgctcagccagtggctgaaatccccttgatgtaaagacgattgtcaagtcaccatcagctaaaaaaacatcaaatggcttcttgatctctgcttgaaaatcagcatttaacgtttctgcaagctgctggtatgattcataatgaggcgaatcttcaagtgatcctttcatgtacgctcccatcatttccttcgcaaattcctcattcatcgcaaaggttgtacacaatgaaaatcttggcagcttcagcatgttggcaatgactttacccgcgagaagatggtgatcatatatgacataatcatacgattcatgtttgacttcctcataaatatgagtcgcgatatccttacaggctttcaaaaaagcgcagagcatttctgtgaaatctctttcttcatcgccggttgcgtttttcccgaagtaatctcctctgaaatcatgatactcacgaaactctatatcaagagctgtgattttttctttatattccttcactgcgtagtacgtaatgttttctccccgggatttcagctccttcatcacaccgatagagggattaatatgcccttcaccgggaaaaccgatcattaatacattagccatgcgacagcacccttcctttgaaaatttatgtaatattttatacggtactataaatacataaacaggtaaagtatttcacttaattaatattcattacatataacttttctaccagtttatatttcctgtcttcaagacaaaaagcattcagcttgaagcgaatgctttaataaagatacgaattcagtcattttgtctcatgataggattcttaatcaggccctttttattatttttacgttcttggtgaaattaacggatataatacaccgtctttggcaaacgacatcttccctgtttcctctgaaaccacgagcaccagtgcatccgtatagcccgacataccgagagccgcccggtgccgggttcccaaatggatatccacttccttcgtcgtcagcgggagcacattggctgctgacacgagtttgttttccctcactaacaaagcgccgtcatgaagagggtttccggggaaaaagatgctttcaattaatgaagagctgatctcggcgtgtagggaggtgcctttttgaataaaatgttcaaccgggtccgctctttcaatcacaattaaagctccatgcttatgttccgataaggctttaatcgccttggccagctcaataaatgccggcgtaaattcctcaatgtatgattgcaaataaaaggaggatgcaatcccctgcatgtcctgaaatatgtgccccaaatcatctaattcacaaaggagacactggtctttttcgtgaagcgttttcaagattagagatgcatcacctaatatttgctctaggtacacctgtattttccccttgaacgcattttctgatatctgctcatagcgcataatcttcatctcctgttcaaatttccaacttttcacgaatgcttatcttattgatgcacattctattggtaaaggagggatgtaaagaatggaaatcgaaagaatcattcagtatatttgcacctttttaggcgtgatttcgctttcttttatttatgcccaaatgtttagaaaaacgaaaccgacaaaaaaagaataggcccggcgttcattgctttttatacataaaatgttataatttctctcgttatgaaaaagaaacggagatcaatgtatgaaagaaactcaaaacgcccgggaaaaaatcaaacagctcttgcacattttaataccgatattcattacccaggcggggctttctcttatgacttttctagatacggtgatgtcagggaaagtcagccccgctgatttagcgggtgtcgcaattggctcaagcctttggacccctgtttacacaggacttgcaggtatattaatggcggtcaccccgattgtcgctcagttattaggcgcagagaaaaaacagaagattccctttactgttttacaggctgtatacgtggccgcgctacttagcatcgccgttttattgattggatatgctgcagttgaccttattcttggccgattgaaccttgatattcacgtgcatcagattgctaaacactttttaggctttttatcactgggaattttccctttatttgtttacaccgtgttgagatcattcatcgactcattaggaaaaacgagagtcaccatgatgattacactcagttctcttccgatcaattttgtattgaattatgtatttatcttcgggaagttcggaatgccggcacttgggggtgtcggcgcggggctggcatccgctttaacttattggtgtatctgcatcatcagttttttcattattcataaaaacgcaccgttttctgaatacgggattttccttaccttgtataagttctcttggaaagcatgcaaaaatttgctcaaaatcgggctgcctattgggttcgccgtgttttttgaaacgagcattttcgcagctgtcacgcttctcatgagccattttcatacagtgaccatcgcgtcccaccaggcagccatgaattttgcgtctcttttatatatgctgccgcttagcgtgtccatggctctaacaattgttgtcggatttgaagcgggtgcagcccgttttaaggatgcacgctcatatagcttaattggcatcatgatggcgatcggcttttctttgttcactgccgcctgtatccttttattcagagagcaaattgcgggcatgtacacttctgaccccgatgtgctccggctgacacagcactttttaatttatgcgctattttttcagctttccgatgctgttgccgcaccgatccagggagcactcagagggtacaaagatgtgaactatacgcttgcggccgcttttgtctcttactgggtcattggccttccggtcggttttatggtcggtacgtttacaagcctcggtgcattcggctattggattggattaatagcgggactcgccgccggagcagttgggctgtttttcaggctggcaaaactgcaaaaacgttattcgcaaaaacaacacatttaaaagaggtgatcaatcatggcaaaaaacaaaaaattattcgagtatctttcccagcatgcggaaaccatcagttcaacatggtatgaaacaatcgaggagactgatcccaattccatttatgcctcaacagatcctgttgtcattcacaatttaaagagccagaatcttgcctttaactataaaataaaccgtatttttatagatgatgaggacgtatacttgcctatactgaaagaatgggcctttgaagtcacacaggatcaagagcatttaaaaactcctatccactatattattcgggagtttgtcagagtgagagatttatatgtttcctatgtgaaagaatttgtccatctcaatcaggatactgtgaaaagcgaagaagccgaagacctgtatcacgcccttataaaagcgtttgatcttgtgattcatatttttatagaagaaatgtacaaaaacacaagccttcagcttcaggcccaaaaagatatgattactgaattgagcgctccggtcattgtgctgtttcacagcgtcggactgctgcctttaatcggagatattgatacagtccgcgccaagctgattatggaaaacacactgcatcaatgtgcgaaaaaaaaggtgacacaactgtatattgatttgtcaggagtagctgtgattgatacgatggttgcccatcagctgttcagtctgattgaggcgcttcgtttaatcggtgtttcttcaactttgtctggaatccgtccggaaatcgcgcaaacagcggttcagctaggtttgtctttcgaaggtatttccttgagatccactctcgcttcagcaattgcatcggacttaaaattaaaaaaggtataaggcttaaggccttatacctttttgattaatcattccattgatacgtccaatatatttcttcttcaaaccatgttgccataacaggttcattatttttcaatttctcttcaagctctctgagcatgccttctgtttgtgtgcggtgagctcttaacgcattcattttaatatcagctacttctttgatatcaagtacgacatcagcttcgccgagaacctcttctctgttgcgggtaatggccatgcagattgtacgcggacggtcttctttctttttgcggtacaatgcacggataaccgcttccccgcatgcatcatggtcagggtgcacaccgtgtccgggataaaatgtgacaattaaacttggttttacatcatctatgatctcttccatgatatcagctaaatactcatcatcttcaaattcgagcgttttgtcacggagtccaagcatacgaaggtcattgatatccatttctttgcaagcgttgatgagctcttgttttcttagcagcggcaacgtttcacgattcgcgaaaaatggatcgcccatatttctgcccatttcacctaaagtggcgcaggcatacgtaacgggaatgtctttttttctgtttaaggcaatgaggcctgccactccatatgattcgtcatcagggtgaggcaggattactaatacgtgttctttcattatttttcacccttttctttaaactgtgaacggtttttcactgatttgcagagaaatagccagtttaccgcccggcagatgtcccgccattaataaacggttttcttcatctaccgtgtattcagtcaagccttcagcataaatccagccttcttctgttttcaagccaacgcggtaaggcccgttgcctttgatttttgcctgatgataagtgacttttgcattgcggatatacgcaacaaccgtcatgttcttttcatttaagtgcgctgaataagaacctgtggtggtttctaaatggatatatacagggcggtccgcatatcgttctaaagatgcttgcacatcttcttttatgatcgctttcatgattgctcccctctttcttcttttaaatactctgcacgttctgtatgtaatttgaccagctgatatttcacagccggttcgagctgtgaattcacaatgcgctgaatcgcggcaaaatatttttccagcatcggttttcggagtcttggatgtgttcgtttatccaagagctcaagatcaatcgcctctgctaccgcttctgcgtcatcatgtgcgagagatcggttattccaaagtgaagcatatgctttcactatctctttatcattgtccatcgtcttgctcctttatgtcttacatacatgaaatgattatacataatatatgcatcagctgaaaagccaaaggcctcaatggctttttgacgcccgtttccacttcacttgtgaaaacgtaaacaagatcagcgcagcccatatacagctgaatgtaaaagccttcgagctggaaaatggctcattgtaaacaaacagcccgatcagaagggtaatggtcggcgcaatatattgtaagataccgacttgatacagtggcagccgtttcgctccttccgcaaacaataagagcggcaaagccgtaaacacaccggccaaaaagagaagcagccacgtccctccgctttctgcacccgctggctgaacatgtccgctgaacagcaaataccccaatgcaatgggcataatcatgaatgtttccagcgttaaaccgatggcgctcggcaggcttgttctttttttgcttaacccgtacagcccaaagctgaatgcgagcagaagcgcaacataaggaatggagccgtattggaacgccgagatgatgacaccggctgccgcaatcgaaacggccactaattgcaggcgattcagtttttcctttaaaaataaaatcccaaggagcactgatacaagcggattaatgtaatagccaagactagcctcaagcaaaaagccatggttgacagcccatatgtatacaaaccagttgatcgaaatcaggatagaagcaagaaataaagagaggatccctccgttctttttcagagagcgcagctcctgccatcctattttccattgccgcaagaaaaaaagtacgatacacataaaaacaaaagaccatataatacgatgagacaaaatatcaagagccggcagctgttcgagaagcttccaatagagcggaaacaggccccacatgataaaggaaacggctgtgtaaataacgcctttttttgtttctgaatattgcatttatatccctgcctttctttagagcatcttatattatatcacgtgaaagatctggcgggcatatactattttgtccgtgaagaaaggatgtgaagacaatgtttgagtggaacaagtactttcctttccacaatcaattttctaaagaagcattaaaaaaagctgatccgaaagaagttgaaacgtatgtcaatcgtgtgatggaaagtgtgttcggcagtgattatgcggctcaatttcctttccgcgatcctcttccccaaaaagaacagcccgccaaacctgatgcaaaacctgatattgatatattcgaaacagcagaccatgtgtttgtaaaggtgccaatcagcgaagaatggctggaacaagtgagaatcaaacacacatctcacgaattatggttggaaaacttcccaagagcagatcatccgaaaaaagtaaaccttccttgtttagtcaaacgcaaaggaacaaaagccgtctataaggatggccttctggaagtcatgtttcaaaagcagcaagactacaatatgtccgaggtagaaatcatccgataaaaaacggcctgcaatcgatgcaggccgttttttattaatagaaaccgggatatcccccgtatggcacgccggcaccaaaaccgtacggtccgcctccatatccataagggccaggaggataggcatagggacgagaatagttaaacagcgcactcccgagaaaaccgcctaataaaccgccgactagaggagcgccaaacaaaaaaggactacgcgccggatatccggctggacctgggattccgcgtaaatacgaatgatgagggtacatgaatttttcctcctttatgtctgcctatacgtaaagtattcagcaaggaagaaaaacgattgggctacggactgtctatgattgttacatcacaagccctgccaataacacacagccgagccctgtaaccgaaagaactgttgtaagcagcgtccaggtttgaaatgtttctttcatactcaagccgaaaaattcctttaccatccaaaatcctgcatcatttacatgacacgcaatgacactgccggctcctgttgcaagcaccattaacgcggggtttacactgccagcctctataagcggagctgccattcccgctgtggtaagcgcagccacggtagcagagcctagacacagacgcaaaaccgcggcgatggtccatgcaacgaatagcggcgacatgtttgtttgacggaaaaaatcagcgacataatcgccgaccccgccgtcaatcagcacctgtttaaacgctcctccccctcctatgatgagcagcatcatcgcaatttgcgaaattgattctgaaatagatctgctgatttcctgcatagatattttacgggcatatcccatcgtatagagtgcaagcaacagcgaaatgagcattgccgttcccggagtgccgataaattctataatgtcttttccttttgaatgttcactcaataataaagaaaaaactgttgccattgccataaagataaccgggaataaagacgtgacagcactgatcgcaaagcccggtgtttcattcagctgaaattctttccttggtcctaaccccgataggtttccatgcttttgatacgcaccaggaaaccgtttcatcgcaaatttattaaataaaggcccggcaatcacagttgtcggaacagcgatgatgattccaaaaagcagcacctagccaatatgggcaccatatgcaactgagatagcagttggagcaggatgtgggggcaaaaatccgtgagtaacatttaaggcggcggccatcgggattcccagatacagaaaagacatttttaattctttagcaatcgcgtaaacaatcggtatcaacagaacaagacccacttcaaaaaacagcgcaataccgatgataaaagaggcaaccacaaccgccgcctgtattcgtttcctcccgaatttgccaatcagcgtaatggcaatccgatagccgcccccagcatctgagacaagcctcccaagcatcgcgccaagtccaaacactaaagctaaatgccccagctgcccgccaattccagcctcaattgaaagaacaattttattgatatccattccaagtccgatctctactaaaaatgaaacgacaatcagtgagacaaaggtatttaattttactttaataatgagaaataacagaatcagcactccgacagctacaattaaaatcggcatggtacccctccaaaagtgttttatatgattctcgcgacaatgttttggcgtttttcatgcctagacgaacagaaaacgctttcattaataactaaaaacgtcttggttatatgattgttatcttttgatcaactaatatgttcatactaatctcctaatcaatgactgtcatcgtttttatgagcttgtctcgattacctaccgcctaacccaatgatttattagttatatgttgattaacttttggttatatgttatgttttttaaagttgactgccaatcattatatctattcattgtctggaagcaaatgagacaatatgagaacagacggataacaacttcacagaaggaggagtacacatgccattattgcgttttgatgtaattgagggccgtgatgaaaaatcgctgcaattgttattagatactgctcaccaagcgatggttgaagcatttggtgttccggaaagagaccgttatcaaattgtccatcagcatcccgcaaacgagcttataatccaagatacgggattagggtttcagagaaccaaggatctggtcatcattagtatgacaagcaaagcaagaaccgaaagccaaaaggaaaaattgtatgctctgcttgctgaaaggctagaagaaaaatgcggaatttcccctgaagacctcatggtatctattactgagaatggtgacgcagactggagtttcggtcttggtgaggcgcaatttttgaatggaaaactataaaatttcgtctccccacaaaaaaaagaagagagagctccaagaagctctctctttttttcataaatgcggaagtcatcagtatagaagcatccagcaatacgaaaaacctggatctccttattagatccggtttaaacgccaattggatgctgactgggttttggccgaaaatataaaattttgctgatttgcataataagataactcataatccccatttacaacaggttggatgctataacttattgatcatttccatgaacatgacacttttgccaatccggaaatgtcagtctgacaaatataaaaagtcatgtaaacggggtgtgaaccgtacttacatgactcaccatggaaacaaaggctctttttcagacgccgctttccttatttctcttcttcacacactgtgtcaccaggctcgcaaaattgatcggcccatgcctgcatctcttgaaatacagcttgaagcgctgttcctttttcagtcagcgtgtagatgactttgaccggcgtttcagggagaacctgccgttcgacaatctcgttttgttcaagctccttcaagcgctctgccaacattttttggctgatcatcggtattgtttccgttatctctttaaaccgtttcggcccatccattagcacatggatgatcagaccgttccatcgttttcccagcaatgagaatgcggattccattttagggcacatcgtatttcccacaagtcttcatcccttcatctattgattgacatgtattcaatgatccattacaataatctttcaagttacatttagtaagcttctaacttttctattatcataccacgtttatccgaaggaggaaacactatgacgaatactctggatgttttaaaagcacgtgcatctgtaaaggaatatgatacaaatgccccgatctctaaggaggagctgactgagctattagaccttgccactaaagcgccttccgcttggaaccttcagcattggcattttacagtattccacagcgatgaatcaaaagcggagcttcttcctgtagcgtataatcaaaaacaaatcgttgagtcttctgctgttgttgccattttaggcgatttaaaggcaaatgaaaacggtgaagaagtttatgctgaattagcaagccaaggctatattacggatgaaatcaaacaaacattgcttggccaaatcaacggtgcttaccaaagcgagcaattcgcacgtgattctgctttcttaaatgcttctttagctgctatgcagcttatgattgccgcaaaagcaaaaggttatgacacttgcgcaatcggcggatttaacaaagagcagttccaaaagcaatttgatatcagtgagcgctatgttccggttatgcttatttcaatcggcaaagcagtgaagcctgcgcatcaaagcaaccgtctgccgctttcaaaagtatcaacttggctgtaaggatatgaaaaaccttagtccgaaatccggactaaggtttttttatacaatcgcctctttgtaccattcacgagcctgttcagcttcatgctgagtcagctgatggcccccgtcctgccagtaaacggaggctgatgccccgctgtcacgcaaatagcggtaaagctcttctgattcttccttcgtgcaaagaggatcgtatttcccggcaccgataaaaacagggagccccgccatatcaggcagctcgataccccgaatcggaaccattggatgatgcagaatagccccttttaacacatctttataatgaaaaagcaggcttgccgcaatgtttgcgccgtttgaataaccgactgcaatcactcggccgcgattaaactgatgcgtttctgcagcctcgtcgataaaatctttcaattctcttgtccgcaccacaagatccttttcatcaaaaactccttcactcagacgtttgaaaaatcgcggcattccattttcaagcaccgatcctctgacaccaagcaaatgggcatcagggtctataaaccgccccaatgaaagcagatcgtgttcattaccgcccgtgccatgcaacagcaaaagtacgttgtcagatgttcctttttcataaatatgcttcattataaattcccccttttaaagttcaggtaaaatgtctgtaatttgttgtctatgtttctccagccattcaggcagttttaaggaagtccctagctcagcaaacgtttcatctgtcataaagcccggttcatctgtggcaatttcaaataagataccgcctttctccctgaaataaactgatgtaaagtattccctgtcgagaatttctgacgcaggcagatggttttcagcaataatcggcagccatttcgcctgttcctttttcttagtccgaaacgctacatggtgtaccgtaccatatcctccgactcctcttttttcaggatgtaaatggacatcaatgacaccgccgacggccgctgaggatgccagtctgacaatctggtcttcttcggccactttggtgtatccaaagctttccgttaacaattgtatggtcgcctgcgggtcgtaagaatatagcagcacacctttcattcccgtaattgcttcatttgttgtgatcccgtcaggcgtccactcgcttttgccgcttttcgcatcctccatgatcgccagcggaaggtcttctgtatcgtcaaaaataagacctttttcaccaaacaacgttttttcctctaggctcagcccgcttttctcaagacgctccttccaaaaagacagggagcctgagggaactgaaaagtacacccggcccgcttggccttttcctaccgttccctgtccgcttccttggaacggaaaaaaggtcattattgtaccgggatctccgttttgattcccaaagtaaaaatgatacgtcccgggatcatcaaagtttactgtttttttaacaagtctgagcccaagcacttctgtataaaatcgcaagttttcttgcggatctctggcgaatgctgtgacatggtgcaatccttctgttttcattttctcactcctatttatctcgatttcaagatatttattattttaaacctttattgaaaaggatgcaaaccatgtgttttgtttaaataactgaaaaaatcatttttttctaataattatcttgtgatcttttcttacaactgctattatagtgagcattatcatgtttcaggaggaaagtaaatggttaaaaaagcacttattgttattctcattcttttgccattcgttcagctcgcgcttttgccgcttgtgaatcgaatagaaccgattatgttcggcctgccgtttttccacttttggctgctgctgtggattattgttacgccgttatgctcgtttggcatttatcagatgcaaaaaaaagatggaggacttgaataatgcaagggaatctgactgcacttctcattactgctattattgttttaaccgttgtctgtatcggctttctcgccggaagagacaaatcctcacgtacttctgtggaagaatggtctgtcggcggcagacgcttcggcggtcttctcgtctggtttttagtaggcgctgacctttatacggcctatactttcttagggttgaccagtactgcttttacaggcggaagtgttgcatttttcgccattccttattctgtgttggcctactttatcgcctacttcttctcgccaaaactttggaaagttgcgaaaattcataaattaacaacactcgcggattatgcccgggaacgttttaacagtaagcttttggcaagcctcgttgccatcgttggggtactcatgcttattccgtacatatgccttcagctgagcggcattcaagacacgcttcaggttgccggcactggctatattaacgtaaaattcgttgtgatcatttcatttattcttgttgctctttacacattcttcagcgggattaaagggcccacatatacagccatcattaaggacattttagtatgggtcattatgctgtttatggtggtgtccctccctctcattcattttaacggctggacgccaatgattgacacgttagtgaaggaagcgccgcaaatgctgacgataccggcagaagggccaaaaggcatcccttggtttatcacagcatctattgtttccgctctggcactttttatgtgggcacacgccgctacaggagtttttacagcgaaaagcgctgatgcagttagaaaaaacagcatgtttttgccgctttacaatattgtgttaattttggtcatttttcttggctttatcgcctttcttgttctgccggaagatacaaatccaagactcgcgctgctgcatttgattcaaacatcttacggcggcgtggcacaaggttttgcatatgccactatcgctcttgcttcattaataccttgttccattatggcaatcggcgcatcgaatttattcgccaacaacctataccgggatttgattcatccgaatgtgtcgcaaagcaagctgactcttgtcacacgttcaatggtgtttgttgtcatcggtctcgcgctgctgtttggaatgctgtttccgactgccttagtgacacttcagctattaggtgtatccggtatggtgcaaatcttccctgcgattgctgtcagcctgttctggaagcgtcaaacaaaagaagcgacagttatcggattattagtcggccttgcggttacgtttattgtgtataccactcaatccgcacatggcatttatgaaggattctggggattggccgccaacatgatcgctgtggtgatcctgaatccgctgttcgttaaaaacgcgggatccaatcctgtcattgaaggtttatttggcaaaaaacaagacgctaatccaaatcaaaagggtgcataaaaaaaccatacgcggcagccgcgtatggtttttttacatttcttttttcagtgtttcaattgccttttccatttgcgtatcattatcagacagcttcttttgaagttctatcattaatttcgttgttgtatcgccagtcagtatgcctgtctctttcagcttctcttttttctggaactgtttgacgacagatacaaagtcctggtcatacgtactgttaacctttaccttgtaaccaagtgctttgagcattttctgagccactttgacgtttgtgcctgtatcacctgatttgtacgttttatctgcgtccaaatacggcagcttcgcgtaatcaggcagctcagctttcacttgaggcttgatgccttttttgtgaatccattcgccgtcagcagtcagccatttggcaactgtcagtttgacagtagagccatcatcatattcttttgccgtttgcactgtacctttgccgaatgtcgtctcgccgattaacggtacgtttgacgattcatgaagggcagcggccataatttcggctgcgcttgctgtaccgtcatttactaaaacgacggtcggcttggtcactttccgttctttttcggccttcatgacttcttttgaaccgtttttgtattcaacctgcatgatgtttttccctttatcaatgaacaggttgctcatcgtaatcgcctgttccattaagccgcccgggttgcctctcaagtctaaaatatagcctttggcgccttttttctctaaactgtcaatcgcatctgtcagctctttagctgttgtttcagagaaagaagtgatttgaatttctccgatgttgttgtctttcatctctgaatagacagtctctacaggaatggtatcgcgcttaatggaaagatcgatattccccactcccgctctgttcagttcaagcttcacctttgtgccctttttgcctcggattaaagcgacggcttcatttacattcatgccttttacgctttttccatttaccttaatgatttggtccctcggtttgataccggctttttcagcaggtgaacctttaattggggatacaataaggatttctccgtctttctcctctacttgggctccgattccttcaaaagatgctgaaatcgtctcgtcgaatgatttcgcttgctcttgatccatatatgtagaatacggatcatccagtgattgaatcattcctttaattgctccgtctactaatttgtcatcatctgttttttggtaataatcacttttgatttgctcatacgctttatttaatttgtcgaacttgctgtctcctgtgcttgctgatttttggcccaggatactggaattgcccgtaataaataaagtaagcgccgaagcgacaactgcagtgatcagcacaataaaaaacagttttaattgccgtttcaattaaacaccacctttttcttcttacattattatcatggacgaattcttattcgtcaactcggagcagaaatgaaagagaaacgcccttcttttgcttttcataaacctatgtctttatacgacatatgataaggaaaaaggaggattcgatattgagccgatatttagaaatgctgtccttattcggtgtcgcaggggcgcacccaggcgggctggctttttcaaaagcggtcttgcaaaaggctgcaccctctccgaatcagccgattcttgatgccggatgcggaacagggcaaacggcggcttatttaggacatttgctgtatcctgtaacagtcgttgataaagatcctattatgcttgagaaagcgaaaaaaagatttgcgaatgaagggcttgccatccctgcataccaggcggagctggaacatctcccgttttcttctgagtccttttcctgtgtcctgtcagaatcggtcctcagtttttcacgcctgacatcctctcttcaagaaatttcaagagttttaaaacccggcgggatgctgatcggtatcgaagctgctttaaaaaaaccgatgccccctgcagaaaagaagcaaatgatggatttttacggatttacttgcttacatgaagaaagcgaatggcataaactcctaagatcctatggctttcaaaaaacagaagcgatgacacttcttccggaagacatggaatttgaaccaaccacagaaatggatttatcgcaaacgattgatcccatctattacgatacgcttcaaactcattatcagctcatgcagttatatagtgagtacatgggtcattgtatttttatcgcgtacaagtaaaacggcgtatcgccccctgttttcgtccaacctttttttcctatctatcatatgctgatagaaagtcaggataggaggggaacaatattggagagatattatcatctttgcaaaaaccatcaaggtaaagtcgtcagaattacagagagaggcgggagagttcacgtcggcagaattacccgtgtaacaagagacagagtttttatagctccgaccggcggagggccaagaggtttcggttacggatattggggcggttattggggatacggagcggcttacggtatttccctcggtttaattacaggggtcgctcttgctggtttattcttctggtaagcatagaacaaatgctagattcaccagacacaatgaagcccgcttatctagtgtaagcgggcttttcattttaaattttcttcactttttcaaagtactcttcaagcgttaaatcattatcttggatgacctttgcggcttttttgcctacatagcgcagatgccatggctcatattcatatttcgtgatatcttctttatttttcggatagcgaatgataaagccatatttataagcattgtcctgcacccatttcccgtctgccgtgcttccgaacgcttcatttagctcaaagccattgctccggctcgaaatgtccatcgcgaggcctgtttggtgctcgctttcacccgggtaagcaaccgcttcctttgccttcttttccccttttaggcttacttcattgtcaaaaatgactttctgtctgtcatacgaacggtaccctgagacagctgccagttcatagccttcctttttggcagcatcgaacattgtttttaatgcgtcggccgcttcttttctgatgtaacgtttttgaatcttttcttcaaaagaaaactctacatctggtatgacaagatcgctaggttcatagtttccgggcagtgcatattgtttattgacaagcgcgagtatattttctggattttgaatggtttccagaccatcgacttttttaatatcattgaaatactggctttccaatgaaaactcactgttttgagtgtttgattttttgctgtcagctgttttttgttctgtttgctttgtttctgctgtggttttcgtatccttttgagcatctccgttcgacatgctgcagccggctccgactattgccgttacactcagagcggcagccagtgagaaccatttaccggactttttcatattacattaccttccttttatcaatcgtttccgcattcataaagaagaggctgccggcacccagcacgcctcttgatatattttattgtgatacggaatgtaaagccacttctatcatatcatgaaatgtcgtttgacgctcttccgctgtcgtttcttctcctgttaatacgtgatcactcacggtgagaattgacagggcttttcttccgtgcttcgctgctaatgtatacaatgcagttgtttccatttcaacgccaagcacaccgtattttgcaagtttttcaatttgcgaatcgtcattgtagaactggtcagctgtaaatacgcttcctacagtcaccggcacacctttatcctttgcggcatcataggcattttttaaaagctcgaaatctgcgcaaggcgcaaaatcaacgcttccgaaagcaactctgttcatttgtgaatcagttgaggaggtcatcgccaaaatgacgtctcgcactttgacatctttacgaatagcgccgcaggaaccgactcttattagattttgcacatcgtagctttgaattaattcattcacataaattgaaatagacggaacgcccattcccgtgccttgtactgagatttttttacctttatatgtacccgtaaatccatacatgcctctgacttcattgtagcattctacattttcaagatacgtttctgcaataaattttgctctgagaggatctcccggcaaaagcacagtatccgcaatttgtcctttttcagcacctatatgtacactcatctcatatcctcctgtaaatctaaattatcatccagcccgtccattttacaacgaatgtcatgatgaaacaaacttcagcattgattataaaggaatatgtcgaaaaaagaaatgttcgaggatctgttaggcacttcctcagaaaaacggataatcggggtgttaatttgaaaacctaaccgcaggaaggaggggtaggacatgggtaaaaaacatcgtaaccggatcaccggccaaaaaaagaacaatcatatacctgaaaaagatatcattgcagctgaagaagcacacgggaaagaatattctgctgccaaacgcaagccttaaaactgcagaaaactgcgggtttccgcagttttcttttcattatgtcgtttgtacaatcagacgattgattttcctccagccggcgggaagcagttgataatatgttttcccttttctgccctcgtcaatcaggatcacgtcccctgtggccatgaatcttgcatcataatcactcggaacagtgtcgaatacattaaacaaagagaatgctcttttcagcacgtcttgatgatcgctcccgttcagttcagttcgatagacggctctgtagccctttttttcgccaaaccggggtgtctgaaatattgtcacgtcataggaacaagacttctttttaaacacggataacatcatcaagatcccctccctcttatttctttaacatattggcgtttttgctgtgttttcctctctctatttttgtcgaaaccgcttaatcttttcgtcaaaaccttttactaggaaaaacagaagcaagccgaggctaaagccgcctaacacatccgtcacaaaatgaacccccagatacactctgcttatgccgactaaaacagcaattacaccggctatgatatataccatttttttatgcttggacaaaaacgggaggtgtttcactaaaaagtaagcaataacaggatagacacaagcagcattcatggaatggccgctcggaaaactgaaggatgattcatgaaccagcggtgcaaaatcaggcctcactctttcgatccattcttttaagactttgtttaacagccgatctgtgccgaatactaagagcatcaacaggccgtcccatgtttttctgtagaaaaacatgcctgctccaatgatgacaattagagggagcagaaaagaagaagcaccaagatgcgtgatccccgtcatgacttcattaagccatggctgacggatcaaaacagctgccttgcttattgcttcatctgcagattgaacagcatttgtatgaatggccgcagctagaatgagaaagaaaagaaacaagctaacgggcttgtacaatttaaccacctcaattttcacagaagtcatagaacacgaataataaaaccggagctgaccgctccggttttaagcctcactcatcttcatccagctcttcatctatcatacatttttctatcaaataatcaaaggtaatatcagcgatttcaaacagctcatcctcactcggtatgtagccccgtcttgcaagctctctgtaaaaaaattcagcgatttcttccgtatcaatcacaagatctatttctttcatctccgtaccgcctccttttttatgttttatgaaaaaacaggctgaattatacccggtgttctaaacaattctttcagtcatatattgaataaaaaacgagccatgggaggctgacgctatgattgctaaaatgatggaagcactggacggagaaagatttgatatcataatggaaaaaacgctcaaaggaatgacgcgtgtgatgatttggggctgtctgccatattttttatatgtcttgatccgtatgttcacaaactaactgaaatgctcttttaaactttccaaaacaaacatcatcatgtctttatattcttcatcctgaaacatttcgtacagtattttgtagtcattataaatatccagaagctcatcaacaattgacacagcaaggatgtgaagggtatcttgatcttcatcatcgccttcaaactgaagaagagcagacgatgcgatatcttcgccgatctcatggccagtttctccgacataatggacaaacaacagctgatgcacaaactggtccatttcatattttctaagcaccagcgtgagatcctcttcctccgtttcaagccactctccatcctttaaacgggtcagttcataaatgatatcttcccagccatcttctaaatatctccaaatttctgttctatggccgataatgcgaaagagttcttttccataatcttttacataaacaacgtccccaataaggaattcatactcaatatcaagcttctccatgtcgacaatgacaccctcataatctttataaagctgaatagatgattcaaagtataaaacttcgttatgattgacttcataaagatagtgtttatcaatttggtgcacttttgtgatggtgccgactgttccatacataatgacgactacgatatcccctacttggaatttcggtttattttgcttcatggtgtctccccctcgccgcaacatttctcatacgctatcgtatgccgggtgaagccaattcgcatgggcatgaaaaccaaaggaaatatccaattatggtatgggggacataaaaaaatccgcagtgatctgcggatgaaacagctattatctgccgtgcacttcagactcgtattgatcccaagcttcatcaaacgtcgccatcgtgtgaaggtaatcagcattcagctccaaatatgaactgatttcatgataatcggtagatgtttttggaaagctgtgatcctcatacgcctgattggcaaattcactgatgctgtccttcggcttagggtgcctgtatttcaataaatagtgataaaaggatttcatgggtttcccctcctggtgtctgtcttttgttgttctattatacagttcaagtgtaaaattacaacaaaagaatactgaaacatgactcaggagaagtcaaaatagttgcgtttcaaaattctttctgtctccatgagctgctgatatgtcaggctttcaggcagtttttttgtttgaattaaaagcagctgatcctcaatctcctttaccgtgttttcctcttgataggtcataccgcaggaagaacataccatggcaggggtgtctgtcagttctatagcccttgttccatcagggagctcccagtacaccgtgttcctgccgggcaccgcttcaagctcgccgcaccattcgcatgttttcatgaagaatcccctccgcattcagtctctttctgttttttctgctgcgccaaaaatttcttttctttgagctgatctcttttctcacgccgattttttaatgtttcatgctccggatttgcgatgtatgcctctctccttttgattctgtctacattttcaggtgtaaacgaaacctctttgtcagcaaaaatggcactcagcccgatcggctccttttcgtcagcggtttcagggaaaacggactcaaaataggcgtctgcctgattggggatataattctctggttccggatatgacgtaatcacaccttcaaaatttcttaagatcactttgtcaggactttgtgacaggacatagtttggctgcagggcgattttaccgccgccgcctggtgcgtcaacgacaaaggtaggaaccgcatagcctgaggtatgacctctcagcccttcaatgatctccaaacctttggaaacaggagctctgaaatgcccgattccctctgacagatcacattggtaaatataataaggacggactctgatttttaccaagtcatgcatgagctttttcataattggaaccgaatcattaatacctgctaatacgacagcctgatttccgaccggcactcccgcgttcaccagcttttcacatgcctcaacggattcttctgtcatttcgatgcttgtgttaaaatgggtgttcagccagaccggatgatattttttcaatatctcgcacagatgatcggtaatgcgctgcggaaagacgacgggcgctcttgttccgattctgatgacttccagatgtggaatgctgcgcagctcttttaaaatatattctaaaatttggtcgttgatgagcagcccatcaccgcctgaaattaaacaatctcggatttcaggtgtttcccggatataagcaattgcagcatcaagctgttttttggggactcccattccgatttgtccggaaaagcgccttcttgtgcagtagcggcagtacatggaacattgattcgtgacaagaaacagcacacggtcgggatagcggtgtgtcagaccgggtaccggtgaatcttcatcctcatgaagcgggtcttccagatcgtattttgttttgtgcatttcttcagaaagcggcacagactgcatgcgtaccgggcatctcggattgtcggggtccattaaagaagcatagtaaggtgtaatatttaaggggatcgttttagtagaaattctgacgccttcctcttcatcctcagtcagattgatgactttctttaaatcatctaacgttcttacagtatgtgtcagctgccaaagccaatcgttccatttctcttccggaacgtccttccataactcgatctccttccaatgccgtttcggtttataccatttgtttttcaaacgaattcctcctcgcgcatattttgacttacagttgcttgcaccaaatattcatgttttcaaggccttcggctataaagcaattattgatcagccttccgccattttgataacctgaatggtacaacacagcattcatcccaaaagacgaagcacgggcgagagaaaatacatgaaagatatcctttccagccatttctttttctaacgcctcgattaaaaagcttgttaacgaatggccgcgatattccggcagcacagcgcaatcggttatttctgcatgcccaagctctggattgatttctgcgcttgctgagctgatcaggcggtcatgatcaagcatgatataatacaccgtatttgcattcatcgtcttttcaatataagcggggtcaaataccggtgttgggtacgtgcggaatacttttttatacagcatcgatagctggtacatgtcgtttgtttctgcttttctcatcgtaaaaacgggtgtactgtcgttgcgaagacggggcgctgtgcgatatatggcttcgatgatctcctgttcctctgtataagaatctgtttgtctccggctttctgaaaggtaacgtaccatgacacaagccgaatagccgagataatagccctttagatagccctccggcgcaaataattgtttggcaaggatcggctcatcatgctgcttcgcatagacaatgattttttctgcattctcttcttttgccgctgccaagatatccggcagggccttctcaatagctccgtcataacggaccactctgattcgtttattaaagccgtcatggtccaaaactgctgtgacaccgctactctttattgacttgagcatccgcatcctccccatctgtatgaagcccgcaccaatccatgacaaaaagtgcaataattttagcagattctatcatggcttcaacctcaatgtattcattggcctgatgagccgtttttgtttcccccggcccgaaaacgatcactggtgtatctcctgcatggtacaaaagccctccatccgttccccacggggaagcctcaataatcggctctgtctgtttcattttttgataggctgattgcagcacagaaattaaagggtgatcatcaggtaaatcattcggcagccattgagcgccaaaccattcgacttgtacgggatggcgtttaaaccattcgtcatggtattctaaatccttcagccagttttccaattcaagttttacagcttctggtttctcatggggagcaattccgcatctcccttctataacgacacggtctgcaactgaagatggccaggcaccgcccgagatcgtgccgatattcaccggtaccggtattgggatattgtcatacagcggatctgaaattctcgcattgcggactttctccagctcttgtatcgctgtgataacgtgcatgcttttttcaatcgcgcttaccccttcatagcgtgtgcccccatgtgcggctaatcccttcacagtgatccgaaaccacatcgaaccctgctgcttaataaatagtttcatattcgtcggttcaggaatcaacgccccgtcagcacgatagcctctcatgatggcggacagtgtaccggcgccgccgcactcttcatctacaacactctgaaacaatacatctcccttcaatttgacatcgcaagcgtgcagggcttctaaagcaaaaagaagggctgtattgcctcccttcatatccgttgagccgcggccgtatattttaccgttttcttcgacagcttgatacggttcatacttccaatcctttacgcttccttcaggcacaacatcgatatggccgttcaaaatcagggacctgcctccgccggctcccgtttttttagccacgatattcgggctctcatgaaaatcggatcggttagatttaaagtagggatgctgttttaattgctttatacttggctcccatacatcaatgtccatatgaaattgccgcagcttttcaagcacaacagcttgggcgttaaactctgaccccaatgtgcttttttccccaatcagccttttgagaagacgaatggctttggccgaatgctgatcaagccacccgattacttttctttcaatgtcttgcatcctcattccccctcttaagaaaaaggcatatctattttgatttcagcatctgtcagcctcgtcacctcatcgattgtcgagccattcatcagctcttttaaaatgaagtgatggctatcgacctcaagaaccgctttttcggtaataatcaaatctacacagcctgcagcagttaatggcagcgtgcatctttctgttaatttaggccttcccttttgatctgtatgactcatgacgacaaccacttttttcgctttttgggcaagctccatcgccccgcccataccaggcaccttttttcccggaacaagccaatttgccaaatctcctgattggctcacctgcagggcgcctaaaatcgtaatgtcaattttgccttttctgatcatcgcaaaagacatggttgtatcaaaataagaagccccttttacagcgcggacaggatagcccgcggcgttgcataaatgcgcatcctcttctcccttttcgggactttctccaatgccaaggacaccgttttccgcttgaaacatgacctgcatgtcaggcttcaaaaagttcggtaccaaggatgggataccgataccgagattcacaatcatgccctgcttaatttcagtagcagcccgttttgcaatctgttctctttctgctactcccaagcccatttccacttcactccctcgcttcttacaactccctcaacaaaaacccccggtgtgacaatcatttcttcagaaatctcacctatcggaacgatacgctcagcttcggcaaaggttctcctggcggccattgccataagcggattcatattgcgcgcggttttgtcatacgttagattgccgaattcatctgcaatgtaagcattgatgaaagcaaaatcagccgtcagcgcctcttcaatcaagtatcgttttcccgccactgttacgatgtcctttttttcgcaaaccatttgattatcaatgcccacgtcggttaaaataccgccaagccccgctccgccggcgcgaatccgttccgcaagcgttccctgaggtgaaaattgaacctctaacgtcccctctgtcatctgttttccggctacaggattggaaccgatatgcgaggcgatcagggttttgacccgttgattaacaataagcgggccgatccctatatccgggaaaccggcgtcattgcagatcacagttaaatccgttacaccgctgtccaatatcgcttcaatcaatgaaggaggcgacccgactcccccaaaaccgccaaacatcagaaccgatccatcccgaacatctgcaattgctgtgtcaatgctgattgctttttgaaatgacgccatttaatgtcaatccttttttaagtttttttcgaccgctgcaactgtttctgaaaaaatagagataagctcttccatttcaccgtctgaaatggtaaaaggaggagcaataatgacagcatctccttctccactgtctattccagctttggaaggataaacaatcagcccgcgttttttcgcctcgctgacaataatctgagttatcgtctgctcttgcggaaacactttcttcgttttttggtctgccacaaattcaacgcctaatagcagtccttttccgcgcacatcacctataatgccgctttgagatgccgcctcatcaagctttttcttcagcacagcgccctttttttctgattgtttgatcaagccgtgctttaacacatatcgcaaaacttcaagagcagctttggctgaatagggatgtgcactatatgtgtgaccgctcataatcacacctgacccttgttttatcgtttcaataatagaatcagatacgacggcagcagcaataggcgcataaccggcaccgagtcccttccccagtacagcaatatcaggtacggtgtcccaatgctctgtcgcgagcatccttcctgttctcccaagccccgtcatcacttcatctgcaataaaaagcacatcgtgtgtgcggcatacctcacttaatctctcataatatcccggaggcggagtaatcgctgctcctgcagcaccaataataggctcagccacaaagccggcgatgaattggcttccgattcttttgatcatagtgtccagttcatcagctgcagtctgaacaaagtcttcttctgtctcgtgattcagccgataaatatgtggagctgagatagctggataccgttcaatgagatgggtgaaccggtatctcctttcataaaaaccagataatgaaagcgctcccaaagttattccgtggtaactgctccatcgagacaaaaagatggatttttgtgtttgctttttttcctgccaatactgaatggcgattttcatagctgtttctatcgcttctgatccgctgttgacaaaaaaagaccaattcacatctccgggcagctcctgtgccaagagcgcggctaattgctcggcgggctcactcgtaaactgtgagcggtaagcaaaagacacctgatcaagctgttctttcagcttctcagtcacatcacgaactccgtggccgatattacatgtcaccgctcctgacgagccgtcgagatatttttttccggtctgatcataaacatatgaacccttcgcataactgacaaccggataggccgagctaagctctggcttaatcaaataactgctcatgctcccacctcaaaaccccttttaccatattgtatgagtgtccaaatggcggcatgacgttccccgcaaaaactttttcacataaaaagagccttcctaatagggaaggctcttttggaatttcagcatctagcaaataaaagcggctccaacaataattaataaaatgaacaagacaacaattaacacaaatgtatttgtcccgcagccaaatccgtaaccgtacccagagtatccatacatgctgttttcatcctttcttatcacgatatacggcattttatgcgggccaagtcccaaatggtttgtgcaaacgcctatttcatgtaaggaaataatgaaatacagtatgcacccgctcatattttttaaacgtcagcttttcgtaaaactgagttgcaccgtcagtgcttgcagcaactaagtaggctgcttccattcctagtgatttggcgatggacagcatttctttcactaagatactgccgtagcccttcctttgaaactgatctaaaattgccacttcttcgattttagccgttttctcttgatgatcgataaacagctcgccgcacccaatgggaactttctgtgcctggtcgctgtaacaaacaacaagaatgattatacctgcttcatagaaaggatattttctttttaatttttgttcagcgattgcttctccaatataaatggaatcgtaaattttcataatagaagatccgtcgctaagacttttcgccgtcccccatgcggttaaaggatgtcccatctgccccttccagtcactaagcttcatgtcatatagtagctcatcctcgacgacaaaaccgctttttacaagcgactgcttcaaaccgagcggaaaaacatgctgcggcgacgcttttaaatggagataattcgcatcaagcagctttggtacggagggtaaaaagttaagtaaccgctccaatggaaacgtatcatggagctgaacaaagttatgagaaaaaatttgcggaagctgcggatctctgtatacgctgtaatgatcaaacgatgccgattcagacgttaacaatatatattgatgttccgtttttgaataatgtcctgtcatgaacgtctcctttttatgacctatacctttactctgttgcaatattcaatttctttataatctcatcgtacaccggataaaacggctttccaattggaaattgctgaatatttcggaaagaagcggagattggcttctgatgtaaaaaaaacttccttgttacttgttcactaatcgggtgaaagacgccgtttagaaacaaaaacggctcgcgttcgatgaaaaacagacgtcggccaggcggatttttgatcaattcagatcgtttccacgtaatcggcggcccttccggaagcgcctccatttcttcttttccaattgtcactatgtcttttctttgaaattgataaaattgaaacgcatactggtccacaattcgccttttttttccggcttcgatataaaatattgcaggatggtcagcttcctttactaaaatataattcggaatgtttaaaattttgccaatcctatattggaataaatatgggtctggaacagcgacagtccgatttagatacaaaaaaccccacttttctccaacaggatgccttacaccctgatcaaaaaaatacacattttgatctgaaccttttacaaaagagccgtcaatcaaatcggcgggcagaaaccgatatgcattttgaaatgaatctggggttttataggttgtgtctaatacttcatttatcggcagaaatggggtaaagttgttgagtctcgcccaaaaaattgcgtcgccatgattccaatgcttcatatcatcatcccagtagcctccaaatttatgatggatgagattaagtaacgaacggcgatgcataactgagcaatgatcaacttgaaaagcggcctgatcaagcactgcattggcatttctgtagaaatgtgagatttcctctcccctttcgtttacatgtacaactttttgttttgaatagaccgcctgcgcttcaggcttatgtgaaaactcttgcaccatacggctcagccgctcaggatgataaacagtgtcgtcagtaagataggaaatgtaatcgccgtctgcaaatgggagcgcactgttaattaatgtggcataacgggctgtttttaatcgatctgcaggatgcacgaaactgttatgatattgaatgcgccggtcatggagatacttgtgaatcaccgcagttgtttctgcattcgaatgatcatccatgataaaaagctcccaaagatcatgcgtttgctgtatcacgctttcgatcgctttttgcaaataatcgggtttgttgtaacttgttaaaataatagacactttctctcccatctataccgcctcccaccgtcaaacataaaaacggctccgcagcaagcagagcctctgtcatcatttaaaaagcaccccagcttacaacacttgagagtgaaacatgagctctcgtgttatttaacgggttttggaaaataaccaaatcagtcagaacttcttttacgatgacattttgaagtgtatctccgttgatcaaattgacttttgaaaccggtacgcccagctcttttgcaaaaacaagctggcgtctgaggtcagatggatttccttcagaagacgattgacgtatcagcagaatcagcaaaagcaaaataaaatgcagatcatcttggttttcttctcgatccacttgtttctctaaatccaaatcatccctctcccttatccttatctctgtttcacaatatgtgcgacttcgatttatggtataggctatgtccactccattaaaaaatcagcattttccttaaatagatgaaaaatagatcaggtacggcgttcgactcataccaaataacagccggaagaatatgaataacgtgagttcactatcgaataggaggtgtgtgtaatgagctctgaaaatgcacagttaaaaaaggatttaattaaagccgttttaagccctttatttccaactgcaacagaaggaggagaaaatatggatagtaatcttaaagccttgcttgatgctgccatcgatcaaaaagtagatgaaagtgaaacggttacggcagaatctattttagacccttctcttccggcaagatggatttttgccagaattacgccaggcacgacaatcagcattgtgactgattcaggtgacatgatcggaccggttgttttcgttgctttcgatcaggttcacgggatcgtatttgtaacacaggaaagctccgtcactccggcaggccaagctacaacattaattgatgtagacaaagtagaaagcgttacgttcttttcataacatccgatgaaagtcttgtatatccagtcgggatacggaggaatatacagttattttgatcgctgggctgaagaatgttttcagaacactcatacagagtatatgattgcagataaacctgaagcagaatctttgatgaagatcgaagcgtttcagccggacttcacacttatgatggttggagaccgcgttcctcacgactggctgacctggttaaagggtaaggatatccccgtgtatgtttggctgaccgaagacccattttatatggatatcagccttcaggtaattaagcttgctgacgccatattaacgatagaacaaaatgcagctctctactatcaagagctcggctaccagaacgtctattatgttccgataccagttaaccatcggctgtttaaaaaaatgggcaccgaacattcctatcattcaaatctgttaatcatcggctatccttaccctaatcgggttcagcttacgaaagaagcggtccatctgccattcacggttcgggtaatcggcaaggaatggggaaaatatctgcctaaaaaagtgctcaaacagccgcatattgatgtcgtcagcacatgggttccacccgaacaggccgttcattattataatggggcagacatcgtaattaatgcgcatcgtccctatcattttgctttcaaccaaaatactatgcgcatcaaaaatgccagttttaataaccgaacgtttgatatcgctgcatgcgaagcatttcaattaacagatttacccgcggcgcatcctttttcatcctttatttcttatcacggcatgaacgactttaaggaaaaagccgctttctatatcaaccaccctgaagaacggcaaaaagctgcagcagccaattataaagagatcgtacccgcatttacgtttgatgagcttcctgcaaaactaaaagcgattcatctggcgctctcatgaaaaatcgttcattgctatgaacgatttttttattcatagaaaaaagcagctgcacaagctgctttctattctagccgtcagaacggtctttcagcttcctcggatttacctgtttatgaagatcaggcatttcgccgagatgctgtgcaatttgttcccacgatacaattttgaaattttgattgacggcttgtccgttatcgatattttcgccgtcctgcgccacaaaaatcccgtacggatattttgggccaagtccgaaaccgagaacatcaataccatccgtgtcactagtaccgtctatcttctcgccatctgtaatctcaaagttggctacatagcgatttttcccctgccgttcatacattgcatagctgttatttccttgacttgaagccatgagatatcctttgccatttggtgcataatagattgtcagtccttcaatatcagctgtcaaatgatctcctgtcgcacggtcaacaacctgcccctttgaccctccgccgggctcagcgttaaatttccagatggcttcatcttcctctgctatgtataggttcccatactcatcatccgcaacaaggccttcggtctgagaattcaacttaaattcacgcacctttttccctgttacataaccctttccaccatcaacaatttcatactgctcaaattccccttgtttgcctgtcactaatgcgtaaaatgctcctgttttctggctgtgatacaagctgaatccataaacctcagaaatattggtggaaataggatggttcggatctgtaatgcttttcaattttcctttatccccgtctattgcatatacttcaattgtattttttccttcggaccggttggatgcggcagcaatatcaattttttcgccgttcaatggaaaatcatagcgcagatcgacattattgagcttgccaaactcataagaatgaagctgttttccgtctaaatcatacacaacgagccctgacttcttatttgttgtaatcaacttgcttttttccgggtgtttttcatgaacccaaatggccgggtcatctgctgcatcatcgccagatgcgaccggatctgtctccgtgtgtgcagtcactttgaaatgatgttcctcattcacataatgagccgacaccgaggttgctgtcaggctaagcaataaacccgcggcagtgcttagcagcattgtttttgaaaccttcatttggtaccctcctcttttatcactaacactactattgtaaaatatatacaggtgattaccgtgaggaaaatgaacctttttttatagggtttctgactcataaacaacttattccccaaagaggtggtgagatgactttgccagatttacttttgcggagcgaaataaaaatatgttgaatatttagtacattgtttatttagttttgttttttcctagttacgtccgtttttccattttctattaaaaaagaacactttgtgacatgatcattcccctaaattttgttttattggttgctttcattaattcgattacaaagttgaacatatgatgcatggtagagaaacgagagttggaggataagccatgcctaaacagcaaacagcagaactaaaaccatttttccataacaaaacagttttagtcactggcggaacgggttcaatcgggagtcaaattgtcaaacgccttttgctgcttacacctaaacaggtgattgtattcagcaaagacgacagtaaacagtatgtcatgagccaaaagtatgcggaggataagcggctattatttgtacttggagatgtacgcgatcacagaagggtgaatcaggtgatgaaaggcgtcgatatcgtctttcacgcggctgcgctgaaacaggttccgacatgtgaggaccatccatttgaagcgatccagaccaatctcatcggcggacaaaatgtggtggaagctgccctttcacaccgagtgcagcatgtcattaatatcagtacagataaagctgtatctcctgtgaacacaatgggtgccaccaagctgttatctgaaaagctgtttcatcaagcaaaccgccacgtccaaaacaaaggaaccttgttttgttcggtccgctttggaaatgttctcggttccagaggttcggtcatccccatattatttgaacagatgatggagggtgaacccctgaccatcacagacaaaaacatgaccagatttttcatgtcaatagacgatgcagctacattgacattacaatcggctgctattacaaaaggcggagaaacctttattttcaaaatggaatcactgaaacttgaagaactgattcatgggtttgaagaatatgcatcgcagcacgggctcccgcggccggctgcagtagaagtgggcaagcgtccaggtgaaaagcttcacgaagaattaacatctccacatgaaattgaatcactgtatgaatggggcaacctttatgcgatccttccagagccggaaaaacatcctgactttcgcaaagtcaatctgcctgggtatcaatcagatcaagccccgctcattacgaaagaaagaattgctcagattattgaagaattgcatcaagagaaaaaggcataaaaacaagcctgtctatccattaggcaggcctgtttttaacactttatttattaaagagatgcagatagctttcgtatccttcttcttttagcttatgcttcggaacaaaccgcagcgctgctgaatttatgcagtaacgaagtccgtttggaccaggtccgtcattaaatacgtggccaagatgagaatcagcagttcggcttcttacttctgtgcgaatcatgccgtggctcgtgtccagtttttcttccacttcttcttcttcaatcggctttgtaaagcttggccagccgcagtgggaatcaaatttatccttggatgtaaacaatggcttgcctgacacaatgtctacatacaacccttcttccttatgatcccaatattcattttgaaatggcggctccgtgccgttattttgcgttacttcatattgcatgcgatttaatgactttattttttcttctttattgtacgccatttatttagccccccaatgctcgctgataaatcccgctcgtccggaacctgtccggtagcgctgataatgtgctggattctttttataaaaatgctgatggtagccttccgcttcatagaaaggttcagcttttaaaatgtccgttacaatcggatctttaaagatgccgctttccgccagacgttgcttggaagcttccgcaagctccttttgtttatcattatgataaaaaatggctgcgcgataggaactgccgcgatcagcaaactgccccccggcatctgtcggatcgatttgctgccaaaataattcaagcagtttttcataagggaatacatcaggattaaacgtgatttgaacggcttcacgatgtcccgtcgtttcactgcacacctcttcgtacgtagggttttcagtatggccgcctgtatacccggacaccactttttcaattcccggctgttcgtcaaaaggtttaaccatacaccaaaaacagcctcctgcaaatgtggcgatttcttttttttcagacatactggtgcctcctttgttaatacgtggtattattatattatagcatgtaaaaatagaatgaaaatgattctgcttttcaataaaatctataggttttaagcaatatgcttatgtaatggaggttcacaaatttgaaagtaagaacacagatgatgtacgatatggaaactttactccgtaaagtctttaaacaaatacgcaatgaaatcaatgaaattttagataaagagctgtcgcggaatgaattcaccattcttcgaatccttagtgaacaagggcctaaaaaagtcactgaatttgcgcctattttagaggtatcggcaagccacattacggctgtgaccgatgcgctggtagaaaaggaatggattacgagaatcagatcgaaggaagacagacgcatcatccgcattcatatcactgaagcaggcgaaaaagtccttcagcactttaacgagaaaaaaacggaatatttctttaaacgctttgactgctacactgatgctgaacttgccacgttaatcgagctcttcagcaaacttgataaaaaacggtgaaaaaaagcacataccgatatataggtatgtgcttttcgcagtgcttcacttatttttcagtaaacagcttcattgctttccagcggccatatctataatacaaaaatgccgcgcagctgctaaataaaaaactcattccgattccaagcccgattcctttttgtccaagccaagctgaaaatagagctgtgaaaggatatctcaacacccaaaacgagattaaatttaataccagaacctgcagcatcgctcccgcggccctgacgattccgttcagcacaaaattaatcccaataaaagggtagaaaaacgcgatccacttcaaatattgttcaccaaatgcgaccgcatcaggctcactgataaataaccttatgagatatttaccaaatacccaaatcataaccgcaatcaccagcatgcaggaaataacagctatcacacccagccttgcaattgttcccactcttttttcgtttccgattccaatattttgccctgccatactattgacggccgtaccggcagccattgctggaagcgtgatgatgctatcaagccgctgcaccgcgccaaatcctgataccacgtgatccccgtatgagttaacaacactcataatcgccatcataccgcctgtaatcaccatcatctgcagacctgccggaatcccgagtttcaaaatcagcgcggactcttcccacttgggcattctcggaatcgagaatggcacaagcttgtgtttgatgacataaaacaacccatacaaaaacgcaatgccctgtgacaaaatcgttgaataagccgctcccgctattcccatgcggaacacagaaataaagagcggagcaagcactgtattcagtacaacagcaaacgcaataaaccggagaggtgtcttgctgtcgcccagcgcacgaagcacagtactgataaagttataaccaaacaaaaataaaatgccgataaattgaatctgtaaatacgtctcagcaagcggtatcattgactccggcgtttttagaagacgcagcaaaagctctgagagaaaaaaaccggccgcgccgaatccgatgcttaggcctgttaataaaacaacaaaagcgttaatatacgacgccattccttttacatcatcttttcctttttgctgagataaaatggttaaagtcgcattgttaaggcccaaaataaaagacagcacggtcaaaacaatcgtgcttgataccgcggctgccccaagggcctttgcccccagtaaattgccgatccacaagctgtctataaattgaaaggaaacctgcaatgcgtttccaagcataataggcattgaaaacagtacaagctgtttcagcacgttcccctgtgtaaaatcgtatgctttcatcttttctccttgtgttctcaaattttcttcggaccgcacgaaaaaagagacgttgtttcatgtctcttttttcatgacttatcggttttttttcggtctcgcataccgaatgtaaacaccatcacacttaggaacaaggcacaataggaaacattcaaatacatttgatccatgtcttcagcagccagatgatgataagcaagccagccgaagtacagggaaaatgtaaaggataataaactgaaatactggtaaatctttttcattttcagtcacctctattgtttaggatggtaataggaaaactcaatttcatctttttctaaatttatcttatccgctttgacatacattccattcgttaaaggcatttctgacaaacgcacttcaatgcttttatctccggggtgaacatggacaaatgacggcaattcataaaagctgtccatataatttaacacaaagctaattggtatactcaatttccctaacgaaaatttcgtgacattcagctctacatcaccgttttttttcacggtcggctcaaaagcgataaacgcatcaatagacgtggaaaatgccttgattttccctgcgacatgaacatcatcatcaatctctactttataatcaagcttatttgatgctttgtcgtttaaatatgagttaacaaacgcagctaatgattcttttgtgcttgtcacttgaaatccatactcgctctcagatgaatccttcacctgagcctgttcccccgggagcaaaacaagtgccacaaaaccggcggcgaggataaaattaattgcaagcaatataaaaaacagtcgcttccacttattcatgctgtcaccctactctttcggtaatccttcttttttaatggcttgatagacgcgctttgcgataagagaataacccgtaccattaggatgaaaatcatcttcctcagaaattcggctgctgtcccttttttgattgaacaaatcttcgatatgaacgatttttgcatgtttatcttttttcagctctttttcagcaatatggttccaatccgtgacgacaccatttatttcatttagttctgataatgtaaacgtaaacggattgtacatactgacataaatcagctcagcgtgatcattcagctcgcgaatttcagaaatgattttttcaaagcgcttttcgtacggtttttccgcttcctgaaacggttcaacggttaattgcagaaagttttggcgaaggattttcatcaaatcattaccgccaattgtaaaaaagacataatctgcgtcctttatgcctttttgaacctttttatcttttagtttttctaataaatcatccgaacggttcccttttacagcataatttttcacgtcgaccgttttgacttgtttatctgaccggatagaatccgccaccttgccgacatatccctttccttcgggatctccgactccttctgtcagcgaatctccgacagccgctatgacaatgtgttcttttgttttcgtttcatgggctttttgttttccctcagatgatgtacgtatgctcgtacacgcagtaagaagcaaaatcaaactggccatgattgaaaaaatgcgcagcttcaatcttgttgctccttcccattctactagtggaaagtgtatcatgttttagaagatttgcaaatgcctagtctcttagcttacttgagtgtactggctgactttacatcggaaatgatatcatcgtacggtgtattctccactccattgtaatctttcagcaccttaccgtccggacctaccaaataaaaagaagattgatgaatcacttggtcctctccctccggcttctttacgatcgctttaaagctcttaagtgcgaactcctcaatctcactctggctgtatccagtgagaaaatcccagttatcaaaagataatggataatttgcggcaaatttcttcagctgtttcggcttatcgttttctgggtcaacactaaatgatatgatgcggacatctatattttcggctttcaattttttttgcagatcggtcatatgagcggtcattggcggacatacagtttcacaattggtaaaaataaaatccgccagccatacttttccttttaagctctctaaagaaacgttcttgccgtcttggttttgaaatgtaaaaggctccacctcgtaattgagcggatttttaatctgctgtcctccgcatgcacacaaaaacagaaaaatcagcccagccgttaaccccttgataaccttcatgacatccatcctttccagccagcataaaaacgctttctaaaaccgtccttactgtcccatgtttgtattcgatactgagcaaaaaaaatcctgcatgcctccccattaacgattacaaaggagggcatgcaggtaaaaaacggcatgttacgcgttgtgctttaacacctcttgatgaaatacagcctgataatctgcccacttcatccggcgcttcatataatgtcggaaagaatacacttttgccctgctatttgatgaaaacacttcttttaagtagaattgcaaatggtgatgtaacataaagaaatagtgctcatcttcctttaatacaggtatttctgtcactttcacctgaatcccgtcaccgcgtttgaactctaggcttttgagtaacaagctatcaatcctcttttttgtttttcttctattatatatgatgccagccgggctgtctgtcattttgcgcggttgtgtaaaaaaattagattagcaaatggaacaagtcctcatccttgttcacctctacataatgaaacggttttttgttcatccgttcaatcagcggcccataatcggctttgttctgcagctcgatgccgacaagagcaggtccgttgcttttattatttttcttcgtatattcaaaccttgtaatgtcatcattcggcccgaggacttcgtcaagaaattcgcggagcgctcccgctctttgcggaaagttgacgataaaataatgttgaagaccttcaaaaatcaaggaacgctccttcatttcctgcattcttccgatatcgttattgcccccgcttaccacacacaccacgtttttccctttaatttcatccttgtacaaatcaagcgctgcgacagaaagagctccagccggttcagcaacaaccgcacattcgttatataattcaagaatggatgtacatacttttccttcaggcacgaggagaatgtcatcaacgacagtttccagcgtccggaaggtttcctcgccaatttttttaacagccgcaccatctacaaacttatcaattttatcaagtgtgacgacatgcccagctttgtttgattcaaagtaggatgccgctcccgccggctcaacagcaattacctttgtatcaggagacacgtttttcaaatatgtacctaccccagagagaaggccgccgcctccgacacttgcaaaaagaaaatgcggttctgtatcaatgtcgtttaaaatctcgactgcgagcgttccctgtccggccatcacatccggatcatcgaatggatggataaacgtccgagattccgcctcacagcattcagcagcgcttttatacgcgtcgtcaaacgtatcgcctgtcaaaataatatcgataaatccttttccgaatagttcaacttgagatactttttgtctcggtgtagtagacggcataaaaattttcccgtgaatgccaagatgtttacacgaaaatgccacaccttgagcgtggtttccggcacttgcacacacaactccgttctctgtctgctcgctggaaagctgtttcattttatgataagcccctctgagcttaaaagatctgacaacttgcaagtcttcgcgttttaaatagatattgcattcatatctctcagaaagtctgtcattcctctgcaaaggtgtgtgaatgacaacgtcctttacgttttggtgagccttcaaaatgtctttcacttggatgagagagttttctttaagcaacggtttcatgtacagattcctttcttgttttaaatccctatttaatatgccattataacatgaatattcaaaaaataagacaattatttttatttaataattaaaaaaatacagactatgtccaccacatcttgtggtaacttctgttcaaccattatcctgcagagccaagaaaaaagatgatcgtaaaataaagggtgttttcaaccaaaaggcatgatataatgaaaccaattagaaccaaaaggagccaattgatgaatagtgcaccaaaactcaatacatttcaacatctaatcggagaacatcaaactttcctggaagcgaagcgaatcgccaagcagttctcgttatcggagcttcctgtcttaataacaggaaaaatcggaacaggcaaaaatcacttcgcacatgccatacacttggaatcttcgagaagcaatgaaccgtttataagcgtcaattgcagcacccattcggaagaaacccttattcatgagctttttggccctaacggaaacacaggtgtttttcaaaaagcggtacgaggaaccctttttcttgatgatgtatggcgcatgcctgcttctgtacaagctcagctgttaaaagcgcttgattcagacacggagaaaccgcgaatgatctgtgcttctgcagaccgatctgtggaacatacattcaggcaagacttattctacagactgaacattttaacgctcacactgcccgaattatcggaacgaaaaagcgatattccgcttttgacacagcattttctctcaaattccggtcagcaattgttaatcgatccctccgtttttcccgtgcttgagaaacatgcatttgaaggcaatgtcagggaattaaaaaacgctgcagattatatggcggcagtatcaagcggaggaacgatccagccatatgacctgccgccatatattagaggcgcgatagacggaaaaacgtcgaagaaaaaagcgaagctgctgactttaatggaaaaagctgagtttttgtttattttggaaacaataaaagtattgaacgaaaaaggagaacctgccagcagacggatcatttctgaacacagcaaaaatacccaaacctcgttaactcctcagcaggtcagaagccgtctcgactatttggagaaaaaagattatgtcaccaaaagccgcggacgcgcaggcacaaaaattacctttgagggcttgagctttatagagacgttaaaaaatcaaatgatctagcgatcgaaaggagaatgcacttgtttacaatcaaagaagagatcgccaatgcgattacacacggcatcggtgtcctcttatccatcccagcattagtgtttctaatcatatttgcggctaattacgggtctgcatgggacattgtcagctttacaatattcggtgtctctatgctgctgttatatttgagctccaccctgcttcacagcatcacacataaaaaaacgaaggacattttggagattattgatcatagcgcgatttacgtactcatcgccggaacctacacgccttttttgcttgggccgctgaaaggcacactcggctttaccctgttggttatcgtatggtcacttgccctaggcggaatcgtttttaaaattttctttgtgaaacggtttatcctattgtcaaccttcgtgtatttagtcatggggtggctgatgattattgcaggtaaacctttatatgcttcactgagcggagcgggtttcagcctcctttttctcggcggcattttatactctgtcggaaccatcttttacatttggaaaaagatccccttccaccacgccatttggcacagctttgtattgggcgggagcgctgctatgtttttctgcgtgctcttctattgtgtaaaggtgccgttcctttcgtaacagtaacagaaaagcgcagtcttcacgactgcgcttttttttatgcacgtaattgtttttcattggcaggtatataagcttttgaaaaggacaattcaatgtctgccggttttaagcgtttaaaaaacgagcccttttgcatgttatctgttcctttcgtttccaccatcaccaacggaagatgatagcgggccgcaagttctacaggatcaatagaaccatctagtgaaagaatcaggctttgtcccttttccagctgttttgtcacatcttcatataccttttctgaatccccgtctgaaatcacatccatccgatccagccattgcccgataaaaggcaagcggaacacttttgggttggcgataaagccggccggttcctcaatatatccagcaattaaggccagttcagccaaacgcaaacggggatgcacatacaaaacaggaccgtgtggtattggctctggctgatggatcgtcacaactgaaccggagatgccgatacagccttccaaaaacgcctttggctgttcgtacacaagagtcatctgttttttgtatgacagacggggatcgagcattgtttgattaaataattgtttcatattttttaacagcatatacacaatataaaccactagaaggctgtagcgaaccaattaaaatcctcccgctttagaagaattctttttttcatacattagaaattcgtaatcatacgggtttttttcgtctttggtcccctgctcagaagaaaccaacttccaattggattcatcaaattcagggaagtgacggtcaccctcaaactcgtgatgaattttcgtcatatacagtctgtccgcataagggaaaaggtccgtatagagctgagcccctccgatcacaaagcattcttcagggcctgaacaaatgtccagtacatcctttaatgaaccgacaaccgtgcatcccggaaattctgaagccggcgctgaggtaacgacaatatttttccgatttggaagcggacgtccgatcgattcaaatgtttttcggcccataatgattgaatggcccgatgttactttcttaaagtatgcaagatcattgggcaaatgccacggcaaatcattgtctttgccgataagcctgttggcatccatcgcaaaaatgaatgaaatcatacgcttaccgccccttttatatgaggatgcggatcataatcctcgatgataaagtcctcaaatgcaaagttaaaaatagaatcaacctttctggcgaaacgaagctgcggaagcggtctaacatctctttcaagctgcaaattgacttgttcaatatgattttgatagatatgaacatcaccaaatgtatggatgaactcgcccgattcaagcccagtcacatgagcaatcatcatggttagcagggcataagatgcaatattaaacggcacacctaagaaaacatcggcagagcgctgatacaactgacaggacagcttgccgtcagacacatagaattggaacaggcaatggcacggcggcaacgccattttatcaatttcaccaacattccaggcgctgacgattaagcgtctggagttcggatttgtcttaatatcttcaataagacgggaaatttgatcaatggtttctccatcagctccccgccaagaacgccattgggagccatatacaggtccaagttcaccgttttcatcagcccactcattccagattcgcactccgttttcctgcagatagcgtacattcgtatctccttttaagaaccacagcagttcatgcgcaattgatttaaagtggagttttttagtggtgagcatcggaaagccttcccgtaaattaaatctcatttgatatccgaaagtgctgattgttccggtccctgtccggtcttcctttttctcaccatgctctaaaacatgtctgcataaatccttatactgtttcatttttttcatcctttaaaagtagtcttctagtagtgtaacacaataaaaaatcatttctgaacccagaaatgatttttttatagtcagctgacaacaggcttttcatcctgttctttttcttcatcttgcagatcctgatgcgtatgtgcaattctgctcgccgctgctgcagcaagagctgccacaatatcatccaaaaaggtgtgaataccgtctggactttcatcaagttccttaataattccaatcttctctttatccaaataaccgaaattggtcaaaccgatcgacccgtacacattaacgattgaaagcggaataatttcatctatgccgtaaagcggttcatctgtttcaacaaggtgctgcagcggctcggggagaagcttctgttctgcaagctgatcgagtgcaaggcctgtcaaaacagcatgaataatttcacgtttgttcaggactttttctacattctccatgcaaacactgagcggcagatttggattgtatttttcctgaagtttttgaacaatccgtgcaatatcttctatcataacgccccgtttgttcagcatatcctttgttatatcgaccatttcattcattgtgtactttttcatgtctaatggcatctcctttaggcactcatccagttgggaggcgtgttgcggtcccaataaatgctcccaagctcatgatgtgattgaaatccatcttctgctgtatgataatgaaaattaaaccagtagccgtcatgaggcgggtggtctcttcgcacatggaatctgagaagatcttctccagttgtccgattgtaaacgttgaaaattttttccgttttgcccgctgaaggcatgcttgagatcacaacatcttggtacgcctcatcatcttgcaatgtcgctaaataatcactaatcacattttcgatttttggcaggatctctttccgatagtcatcctcaatgacaggagcgattctgctgccgaattttaaaaaggactgatcctcagcgctgtcaaggagctgttccttgtacgattgaaaaagcagttcaggattttgcctgtcatccgactcatcatcgtacaggtcatgctcatcataaaaagcggtgtaatcattctgctcaagactgctcggctgtccggaaggcttgtccgccataagggcagccggaggagatacgagcccgaacgttacaatggtaaataaaaccacaagggtctttctcatccacaatttcatgactgcttattcctctctattttattgtcatgtttctcttattttagcacatccaaaacatgcaagtcatgtactatatgaaactgatatgcaaattaggagattcgttgctatgcactttgtgtaaaaacgcttacaatattccatgaaaggaggctttccgcatgattgacgctctgtttgccacagtttcactcttaacattattatactttgtcgtcatggaggtcaccgattaacagaaagcccgtgatatgaatcacgggcttgtttgaatgacgccataatggaacagtgctgtttttcttttcatgacgttaaaaccaaactgttcaaaccgcggacttttccagtggtcttttagcacaacgctttttctggcgactcgtaccgcttcattgatacatccttcgtgtaaaactgaatcctctgccaaatcacgtaaaggcgcgatgccgtcagaggtctctacaggttcatgaaacattggatcgaaataaaccacatcaacagagttgtcaggaagctgtttgatgtattctaagcaatcaccattcttcacctggattcttctcatcgcagcttgaagctcttctatacccgtttcccatgaatgcagccccgtcctcactaaaacagacacaagatggtttttttcaatcccaacaacagaacccgtttcgcctactgccatacttgcgataatggcatctgaccccagcccgagtgtgcaatctaaaaacgtatccccttcagataatccggcagcccgaagcataggctcttgctctccctgtaagaagcgtttggctctaaacatcgctgtattcggatgaaaaaagaatttggcaccttgtttcgtatacagctcaaaccgctctttgccgaccacaagcaaatcacgttcagctgacctcagcaggtgttcaaccgtttgtttattccggccgcagtatggcatatttagctctttagaaagctgctttgcggtttttatggtgtgttcagacggtctatagcttgttgttatcatcttctatactcccaaaaagaaaatgcccggaaaacgggcatttagcagtgcgcatcgaaggcagcagtcagatttttcatgatttcttccatatcgtgtccttcaatttcatgacgcggaataaaatgtacgacttctttgcctttcaaaagagccattgatggtgaagaaggctcctggccagtaaaatactcacgcattttcgcagtagcttctttatcttggcccgcaaaaacagtcaccgtattgtcaggtgttttgtcattctggaggactgcctgtgtagccgcaggacgcgcaaggcctgccgcgcagccgcatacagagttaacgactacaagagttgtgccctctgccttttccataaagttttctacttcttctgctgttgttaactcttcaaaacctgctccagtcagctcgcggcgcatcggtaagacaagctggcgcatgtattcttcataagccattgacataaaaaaagccccctctagtatccttcatctgaagtaaaggatactatagagagggccggatttcaaatgttcacgccttaaaatatagaagtaagtgtccccagctgtctagattttcataataccgccggtgttggcacttgtcacaagtttagaataacgtgccaggtagccggttttcactttcggttcaaaacctttccagttcgcttttcgtttttcccactcttcttctggcacttgtacatccaagatacgtttttcaatatcaacgataatatggtctccgttttcaacaaaggcaagtggcccgccctcagcggcctcaggtgatacgtggccgattgagaggccacgggaggctccggaaaaacgtccgtccgtaatcaatgccacttttggtccgagtcccattccaacgatttgggatgttggcgccagcatttccggcatgccaggtccgccttttggcccttcgtatctgataatgacaacgtcgccttcttttacttttcggttgataatgccgtcaagcgcctcgtcctgagaatcgaatacgacagccggcccttcgtgtcttgtaatcccattctgtacgccgcctgttttaatgatagcgccgtccggagctagattaccgaataaaacagcaaggcctcccttttcagtgaatggttgatccagcgggtgaatgacgtcataatcctttacttcatgtccggcaatggtttctccaagagtttttcctgtaacagtcagcgcgtctaaatgaagcgctccttctttcttggaaagctcattcagagccgctgacacgccgcccgcttcatgaagatcttcaataaacacatccgatgcaggcgccagcttggccaagtgcggcacgcgctcagcgacttcgttaatgcgttctaaagagtattcaacgccggcttcgtttgcaagggcaagggtatgaagaacggtatttgtagaacctccgagcgccatatcgagtgcaaacgcgttatcaatcgcttttactgtaacgatatcacgcggtttgatatctttgcgaatcgtttccattaattgcgcagccgattttcttacaaactctttgcgttccggagatgtcgccagaatggttccattacccggcaaagcaagaccaagtgcttctgacagacagttcattgagttcgccgtaaacatgcctgagcaagatccgcacgttgggcatccgaactgctctagttcttgaagctcgttttcgttgattttccctgcttggtaggcgcctaccccttcgaatactgaggaaagggagatttttcgcccgtcacttgttcttcctgccgccatcggtccaccgctgacaaaaatcgtcggaatgttgatgcgcattgccgccataagcattcccggtgtgattttgtcgcagttcggaatacagaccattccgtcaaaccagtgtgcggatacaaccgtttccacagagtctgcgataatttcacggcttggcagcgaatatctcataccgatatgccccattgcgatgccatcatctaccccaatggtattaaattcaaacggcacgccccctgcttctctgattgcttcttttacgattttcccaaactcctgcaagtgaacatgaccgggaacgatatcaatgtatgaattacacaccgcaataaacggcttgccgaaatcctcttcttttactcctgctgcacgaagcaaactgcggtgcggagctctatcgattccttgtgtgatcatattactgcgtaattctgccatggtgatcctcctaaattctttcaattgtttgattggattttattttgaaaattttcagtttatttatgagctgtttttgcaaataagataaattcaggccgccctcaccttgttttgttctttcgtgtttttatatttatatagcttttctttcgatttgaaccctccaactattaatattgttacttactataaatagttttcggatatttttcaacaatattcgaaataatttttataaaaagtgaattcacataaaaaaggtgcatgatctgcaccttttttatttctattcgcctttttttctgctttccgtcatttgtttccaaacagaaccttttgcttcttctccatgctcaatacgttcaagcgccattttgacttgaaggctgacctcaaattcggggtcatcttcggcagcgcgcaaagcttcaattgcactatcatccccgacttcgtacaggaacatggccgcacgccagcgaacaagcttgctggagtcgcttaacgacttgatcatagcgggaatggcttgaggatcgccgatatcagacaggcagtctccggccgttcttctgactgatacagctttgtcctcaagtgctttatacaatagaggcagaacatcaggtgtttcaatcattcctaagtacacaacagcctgtcttctgatggacacctttggatcatccaatgccttctgtaaaaccgggatatcctcttctttcggatccatctgttccaagtgtgcataacgctttttccagtcctcatcatccagcatgtcaagcgttactttatacgctttgcgctgtacagcttgttttgcttcgccctttccttgagcggctgcttcagtcagtcgtttcagccgttcatcactgtatgccgcctgaagctcttctgtcacgtcatggccgatttcattaaagtcaccgaacctgacaccttgttctttccaagcccgctcaaacacaacatttgaagcttcagatctaagttttaagatcgcctgctgaaagcgttcaggtaagccgaagcgttcttcccgctccccatcggttaatttaacttgcataggaatgccgctgaacatctgcacaaaaacttttacctctccaaaagattcttgatcagaacgattttcttctgcgctttcagcactttccatcccaaatgcagtgcggacttgcggtaaaatgtctttccagtcgtatcttgcattccgttcaacagcaagaaaatctgcgacgtgatatacccctttaactccatctattttaaggatttccgctataacaggcggtgcgccttctgcttgctcaggtttatagttattgcttttgcccgccggaagctcttccgttaagatgactttcattgtattcgggcttggtgtaggttcaattgattttatcttcatgatcgtcctcctatagcatatctgtgacttattctatcatagtcgctccaagccttctattacgacgttttggcatcaatcccggatatttctttttctaattggcggacaaactgaagcataaaattgtgtctttcttctgccagttcccgtgcagtgtctgtattcatcatatctttcagccgcagcagcttatgaaaaaaatgagcgtaggcgctttgatcatctccataaaggctatgcccgtttgcgcccgcaaacatgaaagctctcgcaatgccgacagcaccaatcgcatcaagtctgtcagcatcctgtacggcttttccctcaattgagagcggctccttcgccagcttttccctgtctcgaaaggacatccttgttataatatgaatcaccctgtcagcattctcttttcctactccgaaaaaaacgagctggtcatatacttcgttcacagaaagcctgaccgtgtcaggcagcttcacatcaattaaatcatgaaccaaagccgcggtttcaacaatgaacaaatccgctttttccttttctccaatatacgctgcaagatctgctactcttgatacatgatgccagtcatgtccagagctttcgtcagtcaggatagattgaacccatgtcctgatttgctctgcctgcttcaattccttcacaaaaacaccctctttattgctctaatagcttcacgatagcgtcttccagctctttcggatttgtatttggtgaataacggccaacgatttctccatttctatccactataaatttcgtgaaattccacttgatcgccttagttcccagcatccctttcgcatgttctgtcaaatacacaaacagcgggtgggcatttttcccgtttacatccacttttgaaaacataggaaatgtaacaccgtaatttgtttcacaaaattcctgtatgtcagcctcttcaccaggctcttggttcatgaattgattgcaggggaaccctaagatctccagcccctcctgctgatatgtatcatataattcctgcagctgctttaattggggagtaaaaccgcacttacttgctgtattcacgatcatcagtacctttcccgcgaaaggctgaagtgtcatgtctttccctgttattgtacgtacctttatttgataaatagacatgtaagtccctcctatgtccttggtgctgattattttaccttttttaaatcgcaattcaaaatgtaaacatcatttaagaactcataagtaatttgacgatatgagcgtccgttcattatcaattcatatggctcattttttatcttatcattctataaaacattacaattccctctgacatcatggaaaatcattttactgtgaaaccaaaaggcgtgtcagtgcgttttatttaaagagttttctgttgtttcccctcaacacgcatagatagattgaaaattggcgtgaaaattcctataatgaagaaaattaaacggggaaataatggaggtggcacgttgcctattaatataccaacacacctgccggcaaaacaggtgcttgaaagtgaacatatatttgtaatggatgaaagcagagcatttcatcaggatatccggccgcaaaaaattattatattaaatttgatgccgaaaaaaatccaaacagagactcagcttctcagattgcttggaaattcgcctttacaggttcatttcacatttttaatcccaagcacacacacgccgaaaaatactgcgagagaacaccttgacgaattttacacgactttttccaatatccgtcacaagaggtttgacggcatgattatcaccggtgcgccgatcgagcatttggcgtttgaagaggtttcatattgggaagagctcaaggaaatcatggagtggagcaaaacaaatgtcacttcaaccttgcatatttgctggggtgctcaagcaggtttgtactaccattacggtgttgaaaaaattcaaatgccgaaaaaaatcttcggtgtgttcgaacataccgttctttcaaaacacgaaagattggtaagaggttttgacgagctatactacgtgccgcattcccggcatacagatataaatatggaacagcttcaagcagtgcccgatttaaacattcttaccgcatcaaaggaagccggggtttgcttaattgtgtcaaaagacgaaaaacaagtctttttgacagggcaccctgaatatgatacaaatacgcttcttcaagagtatgaaagagatttggaacgaaacctttctactgtcgaggagcctaaacattattttgcaaaaggcagcaacgagccagtgaatcgctggaaagcgcatgccacattattgtttatgaattggctgaattattacgtttaccaagaaactccttatgaatgggactaatttttctttttttagtgatacgctgagcaaaaaatatgataaaatacatctgattcagtctgcgtataacaaaaatttaaaatactggaatccaaatcatttaaaattagcttaactttttcactgcattaataattcgattatgtatttgtgttatgtttatgtatagacaataactccttacgatgcatgaagcttgcttgttgttgattacattgaggtgaatttacttgaataccaataaaagagtattaattttgactgcaaattacggaaatggacatgtgcaggtagccaaaacactttatgaacaatgtgtacggctcggctttcagcatgtaacagtttctaatttgtaccaagagtcaaatccgattgtttcagaggtaactcaatacctttatttaaaaagcttctcaatcgggaaacagttttatcgtttgttttattacggagttgacaaaatctataataaacgtaaattcaatatttactttaaaatgggtaataaaagattgggcgaacttgtcgatgaacatcagcccgatattattattaatacatttccgatgatcgtcgtgccggaatacagacgccgaactggaagagtcattcctaccttcaacgttatgactgatttttgtcttcataaaatttgggttcacgaaaacgtggataaatattatgtggcaacagattacgtgaaggaaaaactgctggagatcggcactcatccaagcaatgtaaaaatcacaggaattccaatcaggccgcaatttgaagaatccatgccggttggcccgatatataaaaagtacaatctttcaccaaacaaaaaagtgcttctgatcatggcaggtgctcacggtgtattaaagaacgtaaaagagctgtgcgaaaaccttgtcaaggatgaccaagtgcaagtggttgtcgtgtgcgggaaaaatacggctttaaaagaatctttgagtgcgcttgaggcggaaaatggtgacaaattaaaagttctgggctatgtggagcgcattgatgagctatttcggatcacagattgcatgattaccaagcccggcggcattactttgacagaagccacagccattggagtgcctgtcattctgtacaaacccgtgcctggccaggaaaaagaaaatgcaaacttctttgaagaccgcggagctgccatcgttgtgaaccgtcatgaagagattctcgaatcagtcacttcccttcttgcagatgaagataccttgcatcgcatgaagaaaaacattaaggaccttcatttagcaaactcctctgaagtgattttagaggatatcctgaaggaatcagaaatgatgactgccaaacaaaaagccaaagtgctatcgtaatggcgtacttgagagcatacgaaaatcgtgtgctctttttatttatattcagccatcaataaaagcggttacatttttttatggaacttgcccttcttttgaaaaataagccgtttcgcaacttgacgggtgctcccagatggtgtatagttgaaccatcatttaacaatgaatcaaagttaaatgatgacaaaattttttttagcacatgggtgctacagtactaggaggaattaagcaatatgcaaaacggtaaagtaaaatggttcaacaacgaaaaaggattcggcttcattgaagttgaaggcggagacgatgtatttgttcacttcacagctatcgaaggagaaggatacaaatcattagaagaaggacaagaagtttcttttgaaattgtcgaaggtaatcgtggacctcaagcttctaatgttgtaaaactctaaactcaatacatgatgatgagatgacaaatagaggagaggcattcgcctctcctatttgattttcatctggatttcaatcgccaaaatgttttgtttgcacctctgttcaatctcttcaacatacttttccattgacggttttccttttttcgcgatatccgccagttcttctaaatcactgtatatttctataaatgttttgtgaaggatcaacttcaagtctttatcatccatagctgcgttccccttctctatcaagatacctcaaatagtaaaacagtcctatttattctggttcaatagttatatcggcttatttttattttcttttctattttggtacataaatttcaaaaaaactctgcaaaataatggcggaggtgtttttggtgacttcagaatttcataaagaggatcagactggctttacggataagcggcagctggaactagcggtggaaacagcgcagaaaacaacaggagctgcgacgagaggccaaagcaaaacattagttgactctgcataccaagccattgaggatgctagagaactgtcacaatctgaagagctggcagctctcgatgatcctgaatttgtaaagcagcaacagcagctgctagatgacagcgagcatcagctggatgaattcaaagaataaaaaccgcagcttctgcggtttttatttttagtgattggttaagacatctccgtattgtttcagcttttcaccaaccgtacatttattgatacaaaatgaatgcgcataagttttgccaaattctttgcgaaactgcttcttaataaaacagtccttgcaatattcatcgtgcagttctgtcagttctttaaagatcattttcttatccaatatcgtcatctccgttacggtctaatttcgtgtggctttctacgaattgatgggatagaatttttttagcgaggccgtcagcttcctgattgtcttttcgttgtattgtttcgtaggttggagtaagcttcagcgattcaaggagtgcttctattttgtcgagccattcattatgagatggatcataacaaggccagctgccgtcaagctgattcagcacaacaagcgagtcccctttgattgtaattgaatttctgcttgccccaagctctcttacttctcttattgcttcataaagcgctgcgtattcagcttcattattggttttcagccggaagcttttattttttctcaaacgatgccggattcctcccaatgaataatagatgacgatcccgagaccggccagttcgctctccttatcgaaactgccgtcaaaataaacagtaatgtcatcaggctcttgagcaagctcctctgtcagcttttccaattccttcagcgtccagctgccgcctttctcgtcttcgaactctagctctttcatgtatggaaaacggccaagttctctggcgagcatacgtgcctgctgtgctgtcagccagtcttcgctaaaaaatgagacggatcccgttccttttgcttctattttcaaatgcggtctgagcttcattacaatcaccttaccattcattagttgccgggcttatgctataatcaaaccaatcttaccccggaaaggaagctttttcatcttgtttaataattcgttttggatcttttttgcgatcattcattttatcattgttcttttattttataaaggatttggcaaaatgggactgtttgtttggatcggttttgcgacagtctgcgccaacctccaagtcgtcaaaacagttgaactgtttggcttaacagcgacactcgggaatgtgatgtatggcacaatcttttttgcgacagatgtgctgaatgaaaaatacggaccagctgaagccagaaaagcggtatggctcggattctcaacgctcctgacgctgacatttgtcatgcagggtgtgctgcttttcgaaccggcttccagcgacatatcacaaacagcgctggaaacgatcttcggattccttccgcgagttgcgttaggaagtctgcttgcctttatcttcagccaaacgctggatgtttatgtatattcggcaattagaaggatatttccttctgatcggcttttatggctcagaaacggcggcagtacagcagtcagccagctgtttgatacattcatattcactgcagtcgcctttctcggcatttatccggcaggcgtgtggcttcatatttttatttctacatatttgattaagtttgcggtatctttgatttcattgccttatgcttatgcagccaaaaaaatgatacctaaagatgaaaggagttcataatgcctacagaaatatacgtagacggcgcaagcgctggtaatcccgggccttcgggtattggcatttttatcaaacatgagggaacagcagaatccttctctattccaatcggagtgcatacaaatcaggaagcggaatttcttgcattaattgaagggatgaagctatgtgcaacgcgcgggtatcaatcggtttcctttcgaaccgattcagatattgtggaacgcgccactgagcttgaaatggttaaaaataaaacgtttcaaccgttcgtagaagaaatcacccgattaaaagcggcattccctctttttttcatcaaatggataccgggcaagcaaaaccaaaaagccgatcttctggcaaaagaagcgattcggctgaatgaaaagaattaaatcttgatcattggttcatcctaatggcgaggtgaactaacatgaaaaagaaagataaaggccggctgaccggcggtgttactccgcaaggcgacctggaaggcaatacacataatgaccctaaaacagagcttgaggagagagcaaaaaaaagcaatacaaaacgctagagaggatctaaacgatctctctagcgttcagcttttcaagcatacgctcaattcctttgatttggtggcggcgaagcatgtcagccgcctgctccatttgcaaagtaaataaagcgtctttcagtgtgcaggccagcggcactgagcaatgaatttccgcaagcttcctcgacatctccaaatcgcttaaaccttgctgaatttttccctgctgtccttttggaagaagagaaagattttccaataaacggtcaatcgtttcgtattcacgaatcagtttgtaggctgttttttctccaatccctttgactccgggatagttatcactggaatctcccataagcgctttaatatcaatcaaagccttcggcattacgcctgtttcttcataaaaagtctcttttgtatagactttataatttccgattcctttttgaagcaaagcaacgcttactttatccgttaacagctgaagtaaatctctgtcccctgttacgaccgtaatgtccgcttcattcgcaaataaatcggcaagagtaccgatacagtcatccgcttcatagccggcaaagccaatattcatgattccaagctctgcggctgcttcctttgccaaatcaaactgcggaatcagctccacaggcggcgcgctgcggttggccttataatcttggaacaagtcatttcggtacgttttgctccccatgtcccagcagcagacgacgtgtgtcggctggaatgtttccacagctgtaatcaaatgctttaaaaagccgttgacgccgttcgtcggcaccccgctgtcatttatcataaagttgcgatgtacggctgtggcaaaaaaggcccggaataaaagagccatgccgtcaaccagcaatagtttattattattcatcaaataactcccttttctttcattccttctattttatcataaagcagcccaaaaataaaaaacagtatctctttaattagagatactgtttggatatttatcaatcgttgtgtcttttgttgctggcgatcagcttttcagcttcgcgtcctgcgtaagagtcaaaatgggtttgaaatccgtttttctttttggcattgttattcgcctgtgcatttctgtttccgagctttgttctgcccaacatgaatccccccttacgtcggatgcatatagtatatgcttccggcaggaggttcactcgcgacaggatcatccagcttacatgcggcttacgtattctctgaccatttcttttgatacaagccgtcttgtcgggacgatgccttttttagcgagctgattcatttgctcggtaatttcattaattgcatctgtagtataaggctcatcgtttctgcatttagcaacagcttcttcaatcgccaattcacgcatattttcaagacgcataaatgctttgatatgctcgtgctgttttgatgaatgtgctgaaattgctttatgtacctctgacattaatcgttcatctcgcttttttctatttagtctatcatgacttgaaatacaagccaactgaattttacatttttattgtattgtctgaatttttccaggagatgcacgcctggtacgctatttcaatctctttcgcatgttccccttccgcatatcctcttaaatatgtctctttttgatccgttatttgcgcgattgctttttcacccatatcttcctgtaagcgtctgaggtgagctgtgtaatgagagatcaggctttcttcttcattttttatccatgcctctgtgattttcgtaagtttcatccgtacagcttcgataaaggccgattttcctttctgctcaaaaaactgcttcggtgatttgacctcttttagttcctgctcaaaagcacgttcttctatttccggttcaacttccttcaactgtatgccgttcgaatgctgatcacccgcataaacggaaaaataaccgtcctcgtttaatgttttttgaaattgatccagccattcttcattgatatgccgttcgatgaaaccgctcatgcgaacatcaagcgttttgatttcctgaatatattcaaattgatattcatgtaaggctgttgtcatcgccttactgacgttctttttccaatccccgttttgcagcccgggatgaaatgccgattttaataaatcatttgcaaaatatgataatcgctgtgtaatgtgatatagctgctctcttgtatctttttttactttttcaatgatggtttctgagttccgccgtttctcgatatcggccgctgtccgctcaaatgacagcataaggcgctgtttctgcgcttccttctcttctcgggactgatgctgggattggtgaagctgaaaaacagtttcgcatagtttgtctgcctccgaactgagctgcgctgctgacgctttttttacatccacttcgataaaccggtctaagtgttttcttactttcgggaactgattataaaatgactccggttttcccaccagttcctccttacttgatacggtaaagagctgcggctcataaaccccttcttttacaagctctgcgctgacataatcggtcactgtttcgagttctgttttatcttttgcaaggtctgcagcattaataataaaaaacattttatccatgctgagcgattctttcacaagtccaagctttcgcaaaaatgaacggtctccttttgaaaaagagtgctgataataagtcatataaaaaaatgcatcggcatctttgatatattggaatgccagttctgtatgccgtttattcatgctgctcgcgccgggtgtatcaacgatcgtaatccctttttcagtgagcgggcatgtataatagaccgttacctcttttacagcacaggccgttgtttcctctgctacatacggctttaattcagatagcggaatcgttaatttcttctgttcctgtatatactgctgatacttctcgtatgcaagcaggaaattgctgatcaatttcacgtgttcttcctgcagcctgttttttttgactgccttttcccacttctctgtgaaggaacggcctgccggttcctttggtattccggtgagctgcaaaatttcagccgttatgtcatcctctgtcttaaacactacatccgctgttttgtttaagttgccattgattggcattgtgatcttgttaattgtcgctgtggttggcgttggtgaggatggcagcactctttcgccgacaagcgcattggcaaatgatgatttccccgagctgaagcctccaaaaagagcgagtgtaaatttccgttcctcaagccttttcaccctttcacgaaacgctgaagtttgctttaacaacatgctgcattcgcttaaaaggtcagacaaagtgtaaaagcgtttgatttggtcttgaagcggcatttcttgttccattttgatttctgatttcggcatcggctgcgccgtcagctggcttcggccttgtttctgctctggagccgccactcttgttttcttcgatttaaaccattctgtgtctatatgcatggggcatgcggactcttcttcccaaatggcccacaggcgatcggttttctctcgggcattattctctaaacgcgcctgttcttgaagaaagacaagtttttctgattcttggacgagcctgtctttaattgtttgcacatctttggaaacacgctctttcaccatagcggagagcacctttatgatgtctgcggcttctcttttcgcctctttccggatgagctctgccaagtcttttgtatattgcaatacatattcagaggaaaaggctgcaccatgcttgaccgcgcgttcaatgatgcttatatcaagcggtgtgcgataggcctgaatcagcttttcactttcagcggtatagacatcaaataccttggcgagtttatgaagcgtgtctatcatatgccaatccgcttcgggctctgttcgttttgccacatcagagaaaaaagcattccgccttttatctctttcctgtgcagttttcgctttagaaaagaaaaagccggttttaaaggaaggctcttgtgattctaaaaatgcagccgccaattcacgcatttcaaaaggcgtcaggtttgcgttttttaaaatacgattgatttcttcctgcatcctcgtctctgcctcagtcgtttgtttttcggcctcattcaattgatcacgcagcgattggaccagtccaatttggatattaagctgttcagcgaaactcggagcgcctgtttcgtctttcttcagcatttccgtatgttcctttagcagattacggactttttgttcggttaaagcctgcatattgctttttgattgctgttctattcttcttaactcttctctcaggacccccatctgattgaacgggtggtccggttctgttactgacgtaaaatagagcgcttcctttgaaatcccttcattgcaaagcatctcctctacctgcgctttatagtctccaaatttcgtctccgtctcatcatggcggtcaatttgattgacgataaaatacacattcggaatgctttcttttattgatctgagaaactttacattttcctcagcgtgcacgtgattatagtgaacgacgtaaaacagcgcatccgcttggtgaagaatagaagcagccgatagaaaatgagcatcatctgttgaatctatccctggagtatcaatatacgcaaccccggaatcgatctcagtatacctgtcaaaaatttcgacgctttcaatctgttccccgtctttacaatattgctgcaccttgtctttctggtaagccccttccagctcagcacacgctccgtctgttgtatgaagccgaactcgcttttccccgtttctgatcacaacaaggttagcgcttgtcggaatcgggcttgtcggcaaaatattctccattaacaggcagttcagcagtgacgattttcccgctgaataatgcccggtaaacgcgatataaacctcttcatcagccgcttttttcatgaccgcagccagtttagcagccctttgttcatcttgattctcaataaattgcttataaatttccccagttttatgcaaaagctcttttctgttttgatctgtcataagtctgaacccctttgtgccgtttcaattgtgaacctttttcgaaagatctgaattcattcccttttcattttacacaagaataaaccaaatttctttaggagaatagaaaaaagccgccattacggcagcttctataaaagaaaatctgcaacttttacaagttccagattcatcaaacagatttattagagattccttttaatacaaaaccaattaatacactatatgtacaaaccgctccaagcaaaaacagcattgtcatttgcttcaccatcctgattgagaatctttttcaaattcattttaacatagttgagaatgattttcaatcgctattttatgctgtattcctgtaatgctttgtcttctgcgcgaattctgacgcttaacaacacggcattgaaaatggaaaacagacacatggtgacgtatgcttgataaagcagcggaatcagcaaaatttcgagtataacaacggcatagtttggatgtttcatccatttatatggacctttttttacaagctctacacctggaacaacaaggattttcgtattccaatatgcccctaaggaacaaagcgcccaataccgtacgatctgtacgcttaaaatcactgcagcgataccgagccaccagctggacggctgtttattcatcagcagcacttcggcaattaaggacaggaaaaaaaggatatgcatcgtaatgatatatggatagtggctctcgccaaattcaattgctccttgcttctttaccttttgttcgttttgcctggccactgccatttctgctgctctttgaacaatgagaatggcgatcatcaaccaaaacatgagtcaagcccccttttcccagctgaataatagcaactctgatgagaagcccggccctaatgcgccaatcagtcctcgttcatcttcctttttatgtccgttctgcagatggtctttgatcacatacaagattgtggctgaagacatatttccgtgcttttgcaaaatgctttgcgcagatgaaagcttttctgacgacagcccgagacttttgatgtatgcatcgatcactttttttccgcctggatgcgccaaaaaaacactgatatcatggaatgacagcttatgtttgtccaaaaaaatctgtacatttgttttgagccatttttccaccaaggtcggaatgtctcgtgagaaaatgactttgaatccttgatcggtaaagtcccagcccatgacatcttctgattgtttcatcaaaacagattgggcgtccattatcttcggcgcaagcttcagctttgacatcctgcggtccgccttctctccgcataataaagctgcggcaatgccgtcaccaaaaagcgaggtgccgatcagattgcttttcgttttatcttccggctggaatgtcaggctgcacagctcggcagcaatgacaagcacaaaagcctcaggatacgctttgcagtattcggctgcacgcgcaagtccgctggctcctcctgcacagccaagcccccaaatcggaatccgcttcgtatatggagaaaacggaagttcattcataagccgcgcctcgatactcggtgtggaaagacctgtactggagacgaaaaaaacagcttccactttctcataaggaatggcttcttgaaaaaattccggatgagagaggcactcacgaacagccgctctgctgtgtttaagtgtttcttctatgtatatttgatttttttcttcaaagctgtgcccctctttataccattcaatcggcttaacaaactgtctcgaatggatttgcccgtttttaaaggaggataacagccggtcaatatccttaaaagaatgctgaaacatatagcgggcgaactcggccgctttctcttggtttacattatacgcaggaagacttgttccaatggataaaataaacgccatgcgatcacctctttgcatacattgtgccgcaacaatcttttttatatgcaaaaaaactccgccgcggcggagttagactgctgttttttgttcagcgaggtcagcttcttgttctatttttttagctttagaaaaaaagttatatacaatatttaagacgactgcagtaaagctgcccgccacaatgccattcgttgtaagcagcgttaaggcactcggaagctgtttgaaaatatccggcacaacggtcacaccgagccccaatcccactgagcaggcaacaatcagcagattttcctgtttcgcaaaatcaatgcggctgagcattttaatcccgtaagcgatcaccattccaaacatcgccaccattgcaccgcccaaaacagcggatggaataatggtcgtaaaagcagcgatctttggaaacagcccaaatgccattaggatcacacctgtgaccacaatgacggcattttttttgatccctgtgagctgaacaagcccgacattttgagagaatgccgtataaggaaaagcgttaaaaataccgcccagaagcacagccagtccttcagctcgatagcctttagacaaatctttctctgtcaaacggcggtttgtcaggtcacctaaagcaaagtaaacaccagttgactccacaaggctgacaattgcaacgatggacatcgtaatgataggcgctgcatgaaaagacggcgcgccgaagtaaaatggctgaatcatttgaacaactgccgcgtccgaaacattatcaaattgaacttttcccataaaatatgcgatgaaggtaccaatcaaaataccgatcaaaatcgagacggacttgataaagccttttgtaaaacggtatagaagcacaatgatactcaacacggtaaaagcaagcgcaaggttggagagatctccgaaatctgcacttccttctccgccggccatgttattcatggcaaccggcatcagtgtaataccgataatcgtaacaacagagcctgtcacgaccggcggaaaaaacgatacgagctttccaaagaaaaatgaaataagaatgacaagaatgcctgaagcgataatgctgccgtaaactgttgaaaccccatattcagatccaatcgctatcatcggcgatacagctgtaaaggtacagccaagcactaccggaagcccgatcccaaaaaatcggttgctccacacttgcagaagtgtagccacaccgcacataaaaatatcaattgatactaaataagtcagctgctcgacggtcagtcccattgcttttccgacaatcagaggaacaacaatggcgccggcatacatggcaagaacatgctgaatccctaaagacagcgttttgccgaatccacttctcatgaatgaacctcctgtacgaaggacacttttccttcttctaaagactgaattcttgccaaagattccactcgatagcccagtttcacaagttcatctcttcccggctgaaatgacttttcaataacaatgccaattcccgcaatagaagctcccgcttgcttcacaatcgacacaagcccgtgcgctgcctgtccatttgccaaaaaatcatcgataatcagcacatgatcctgatccgacagatgggtcccagacactgcgatttggctttctgtttgcttcgtaaaggaataaacagacgctgtcagcaagttgtcggtgagtgttaacgattgatgctttctcgcgaagacaactggcacacccagcttcaagcccgtcattacagcgggagcgatacctgatgattcgattgtcacaattttggtaataccgtcttttgcaaacctggacgcaaattcgtcaccaattctctgcataagcagcggatcaatttggtgattcaaaaaagaatccactttcaatacctgatcagataatacgatgccttcttcctctattttccgtttcagtgcttccatcctgtctacctccgttatgagaataaaaaaagcattgcccgctcaaataaagagcaagcaatgctgatatcacaaaaaaccgtacacgtgcggttccattgctcacccatagtcggacatttacggtgcccggtagaaacttgcgtgccatatccacgcgaatatatgagtgttcctattatattgtaataaattatatcaagattctaatctcttgcataggctgaaaataaaaattcccgaactttaattttgtttttttagatatcattcgtatttcaaggggattcgatataaaagagcctgacgacgcgccgccaggcttttgattatgacagatagagatttgaatatttgtttgataaataatcaattaaatagcgaacattcagctcttctcctgttgcatctttaataatgtctaacggctttttccgttttccgtgaatgtgcaccttttccgtcagccattgctttatcggatggaactctcctctttccaagagagcgtcaaattcagggagatcctcaagcattttttgtttcagctgagccgcatacatgtagccgagcgcataggatgggaagtagccgaaatctccacctgcccaatggacgtcctgtaaaatcccctctgcgtcggtctgcggtgtaatccctaaataatcctggtatttttgattccaaagcgacggcagatcttccacagacacttcattgctaaaaatcgctttttcaatttcataacggatgatgatatgaagaggatacgttaattcatccgcttcgaccctgataaatgaaggttttgattcattgattgcccggacaaaatcatccagggagatgtccttgaactgttcaggtgatgcttcttgaatcttctgatagtacggtgtccaaaaatgcttgttgcggccgataaaattctcgtaaaataatgattgcgattcatgaattcccattgatgcgccgtctgacaagttcgtgccactgagtgcttcatcaatattttgctcgtatatcgcgtgcccgcactcatgaatggtgccaaagatcgccgtccggaaatctttttcatcatatctcgtcgtgacccgaacgtctccccggttcagcgtagttgcaaacggatgaacggtttcatcaagtcttccgccatcaaaatcgtagccaagctcctgtaaaaaatacagactgagctctttttgcttttctttcgggaacgcttttgtaagaaagcttgtatctggtttatttccggaagctgtcacctgtttaacaagagggataatcgcttccttcagctcagcaaacagctgatcaagcacctttaccgtgacgccgggctcaaacaaatcaagcaatgcatcataaggatgctcttgatatccccaatacgtaataaaacgtttattgaattcaatcagctgttctaaataaggagaaaacaagctgaaatcagattttcctttcgcttcctcccacgctgtttctgcctttgaacacagaattacgtattctttgtattcagcctcagggattttcttattctcttcatactcttttttcgccagttccactgcttttttcgtatcttccgacaagtcatcaaatcgttcatacaggacatcgataagctccttcattcgatctgatgtttggatattgaatatatctgttgaaagctggccgatgctttcggcacgatcctctgagccgtttttcggcgcgcctgttctggagtcccagtgcattaacgcaactgcttcgctgtaatgtgagattctttttaaaagatcaaaaaattctttttcatatgtatgtatctccatatccattccctccctattctagccgttccattacaggctaatggaagggggtatgaaagtcaaattgtttgtataaaaggctgccggtatgttttgcggcagcctttttattcagttgatcgtcatttgattttttggcggaggtgttcttcgctttttctgcttgatttttttatccacccacactgttgccagcggggttaagagcgaggtgacaataacgcttgtcgctataattgcagttgccgactcagcaactggcgcaaatgaggcattcgcttccgctaatgcgtatggcacggctacagccgcccctgccgtagaagaagcggccacacccgcgacaccgtctccccgcgcgacaaaacgatcaagtaaaaacaaggaactgcccgataaaatgacgacagaaactccgataaaaatgccgagcagccctgattggatcagcattccaaaattcaaggtattgccgagcgaaaaggcgaaaaatggaatgatcgccggcacaaccttgctgaataagtctctgagatcgtgatccagatttccaagtatacatccaagtaaaaacgggataactgtcgctgccagcgtttcccatgggaatgcggcaagtcccgtcacaccaaacgtcaccatggtcataaaaggaccagattctgtactgataaaggcgaaagcgcccgcatcctcttttcttcccatgtgattcatgagcgccaaatacagtccgccgttcgtttcattcattaccgcgacaattgctaaaacagaaaggcctgcaaaaaagccggattgtatgccttcgtcaggtataaattgcgctgcgatcacgccgagcagtgccgcaaatccgacctttcccaataataacgtgattccttttcttgcgatatagcctgaagaacgaaaatcaatcgttgctcctacgcaaaagataaaaacacccagtattggcagcgttccggtaatcaaagcacccgtaaaccctccaaagaactccgctgttccaggcgcaaacgtgttgagcgccgctccaagaaatagcggaataatcatcattcccccaggtacccgttcaattgtcgccttgattttcatattgtggattctcccatcctccggttatgaaaaaacaatttcacttacacttggaaaacagcctgcaaatcctcttttgaacagctgcccagctggctgccgactccgacggcgccagctccggctctaagccaatccggcacttcagacggatgtatcccgcctgtcggaataaaggtcacctgcgggaaaggacccgctaaatttttcataaacgggatgccaaacacaccgcttgggaacagctttaatgtcgtaaaaccgaatgtcagcgcttccataatttcgctcggagtcaagacgccggggatataatgtgtctttacaaaagatagatgttcagcaagatcagctgaaaaacccggactgacaataaactgcgcgccagcctcagcagcttccccagcttgctgcgcggtgatgaccgtgcccgcgccaattaaaatatcttccctattacggaaggattcgataatatctgatgccccgggggtcgtatacgtcacttcaactgcacgaatccctttatctaacaaactctcaatctgctgacaggcctcctgcgtatcctttgaacgaatgactgcaatcagctttgcttctttcagacggttttcaacgactttggactccatattaataatcccctttcttttggtgaaccgttctttgagcagataaaaaagaagctaatttctccctggtcggcaaaccgtccatatcccccggtgcctgcacttgcaaagcgccaatcgcatttcccctttgcaccgcatccttgtacgacaaaccgtctaggataccgctgattacaccgactgcaaatccgtctccggcgccgaccgtatcaaccacccggtcgacccggcagccttctagaaatccttcacttgtccccgttttaaagtaagcgccttcttttccaagtttaatagcaacaaagctggcaccttttttcaaataatagtcggcaatgccttcaggtgttttttctccggtcaatagctctccctctgcgatacccgggaaaaaccagtctgcaagcccagccagatcattgattgtgtgtaccattgttgcttgatcaggccaaagcgaaggtcttacattagggtcgaatgaaatggtcttccctgcgtttctcatgtcgttcatgacatgatacgtgaagtctttcatctcggctgacaaggcaggcggaatgcctgtcacatgcaaatggcctgcgcattgaaaataatctctcggatattcagctgaagttaatgtgcttgcagctgagtttttcctatagtaggtaacttgcgggtcgccttctttcacttttgacttcagcagcagcccggtgggattttcgtcctgcgagcggatcacgcgggacacatccactccctcttttttaagttcctgtacaataaacgttccgagctgatcattgccgaccttgctcatccatcccattcgaaacccgagtctggcaaggccgcaggcgacattgctttctgctccggcaagccctttagaaaaagtggatacttcatgaaggcctccatactcatttgcataaaacatggccattgattccccgaatgtcaccgcatcaagcttcatctcttcccaacctcctcttagttgagggcacctaggattaaagtgactttctcatgatgacttttgcctctaattcaatggtttgaggcgctcctttgtcaccttcaatcctttttaatacacgttccatcgccgtcctgcccatatcatgtgacggctgggcgatcgttgtaatacctggaccgatcagtttataccattccgtatcatcgaatcctgcaatccctatatcttgagggatgcgcaggccaagctcttccatacagctgatgattttcagcataatcaagccattcaaagccagaatcgcttttttttgctccggcatttccttgtgaaaagaacgaagcgccgccttaagctgctccttgtcctttacgtcaatttcaagcaatctgacaagcccgttcacattatgaaccgaagccattttctgatacacagctgctctttctgcacgagggctgatagaggaaatcggttcggtaaacagcgcgacatcagtataccctttgctgtacaccttctgaagaatctcttttgtgatccatctgttgtcagtcgttacggtatccagtttcagatccggcagtttccggtcaattaagattgttggaatttgctgttcagcaaaagcgcgcagtacatccttgttttcccctgttgcgtttaaaatcaagccctcaaccgaatgggcttctagctttaagagcatttcccgctctttttcaggactgttatctgtgttgcacaccataatgctgtatccatattgatcacaaacctcttcgactcccctgaaagcagcgaccgaaaaaggatttgtaatgtcagctacaacaaatccgattaacttgcttttttttattttcaaaccttgcgccattttactcggccgataattcaattctgcaattgcctttttaatgtttttcactttttcaggagaaatcgcgtcaatttttccgttaatatagcgggaaactgtcgatttcgaaactcctgcacattcagctacatctttgatggttgtatggcctgttgttttctttttcattcaagtgctcctgtatctcttatatttgaaaccgatttcaaaaccgttacaacaaaagaataccataattttaaaatttgggaagagtttttttaataatgtgtcaattcattattttttcgttgactcttttcactatttatcctaaaattttctttgaaaccgttaccaaaatattttcattcaagtgatgctgaaatcctaaccaagggggaaatataatggaaaatcgttattctgtacatcctgaacaagtaaaacgctttacaacagaggagcttcgcagtcatttcttaatggatcctttatttacagaaaacaaacttacgatgtattactcacatgaagaccgggttgtcatcggcggagcggctccagggcaaagtgaactgaagcttgatgcaggtgattttctaaaaacagacttctttttggaacggcgtgaaatcgggattattaatgtcggccagcctggtgccgttagagtcggcgatgatgaatatgtgcttcaaacaaaggattttctctatatcggaatggataatcaggatgtatcattttcaagcctgaacggggaaaaagcgaagttttacttcgtctccgcttgcgcccacaaaagctatccgacacaaaaagccgccctagctgaactgacaccggaccgccttggtgatgatgcagcgtctaatgtcagaagtctgtacaaagtcattcatcaggatggcattaaaagctgtcagctgatgatgggaataacgatgttagatcaaaacaacaactggaataccatgccagcacacgttcatgaccgtcggatggaggcttatctttatctggatcttgaaaaggactcaaaggtatttcatttcatgggccagccggacgaaacacgccatcttgttgttggaaatgagcaggctgtcctttctcccgcctggtctattcattctggcgcaggaacatcaaactatagctttgtgtgggcgatggctggagaaaattacacatttacggacatggatctcgttccgatggatgggctgaaataagatgggttatctacatgacgccttttcattagaaggaaaaacagcgctggtgacaggccctggaacagggatcggtcaaggaattgccaaagccctagccggtgctggcgctgatattatcggcacatcacataaaagcagcctgtctgaaacacagcagcttgtggaacaggaaggccggatatttacatcttttacattggacatgagcaagccggaagcgataaaggattctgcagctgagctgtttgaaaacaggcagatcgacatccttgtcaataatgccggcattattcatcgggaaaaagcggcagattttccagaagagaactggcagcacgtactgaatgtcaatctacacagcctgtttattctgacacagcttgctggcaggcacatgctgaaaagaggtcatggaaagattattaatattgcctctctcctgtcttttcaaggcggcatcctcgttccggcttacaccgcgagcaaacacgctgttgccggtttgacaaaatcatttgcaaatgagtgggcagcgtcaggtattcaggtcaacgcaatcgccccaggctatatttctactgcgaatacaaagcctattcgggatgacgaaaagcgaaatgaggacattttaaagagaattcctgccggccgctggggccaagcggatgatatcggggggactgcagtctttttggcatcacgtgcttcagattatgtaaatggacatattttagcagttgatggcggctggctatcccgctgacaaataaaaaaagctgacgaacgatcgtcagcttttttccattacatcatgtgcggttcaacaggcaagacctttttgacctcatcaatgatgcgttcattttctccgccagcgtaaatgtgaattgagccgctgtcttgattcgaacgaatcaggcgcccgatgccctgccgtacacgtaacaacatatatggcagatcaacttcttcgaacggatcttttttcgctccgttgcgcttcgctgtaaatacaggatcgtgtggcggaaatggcaatgaccaaatggtaacattcttcaatgcgtcaccgggaatgtcgagtccttcccataagtgaactgaacaaagtactgtttcctcttcctcttggaatttctctactaagctgctgatttcctcatcaccttcgaagaaaattggatacggcagctcccatgccgccgacagctctttaaactcgtttaattcttcaaaagaagggaaaagcaccagcgttcttcctttgtaacgtttgattgtttcaatcgtttcagccgttttttgttcagcggccatatctgtttttgcgtatagattaatactcatttgctcgtcataatcataaggggaatcaacagttaatgacaaataatcatgaatcccaagactgtcggcaatataatcaaacgaaccgccttctgacagcgtagcagaagagaagatataaggaattttcttagaaaacactttttcgccaagtacttctgctaccgttctcggcatcacgacaaaggttgattctgcttcctttttctccagccagctgatcgcatccttttgatatagagataatgaatacgccatttgttcaacatattcttccactactgacagttcgtattgatcaatcgtatacatttcagactcaaatacaagtgcctcaccgattttatcaagtaaacggcaaagctcgtccgccgcctttttgacacgatggtcattttttatttctaaacggtgtgaaccggctacttcctttgattcttcagaaagaacatagaaaaattcgtcgtttgcgagaagcgcatcttcaatcaattctgcaaactcttctctgatgtcattttgcagcaatcgttctaaaaacaattcaagagtagactgcttcactctataggttagcgctttttgcgcagcaaactctaacaagtgcccctcatcaaatacaactgcactatgatcaggcaagagcggcagctggccctctcgtttgcgtgattcttccgtccacacatgctccatataaaaatcatgggaacatatgattaagtccgttgacttgcgatagtaatctctggaaagtgtcagaccgcatctgtgtctcatatcacaagtcagacagtcctgaaacgagtcgtagcttacgtcagaccactcttcattcgatagatttgcgtactgcttacggtcgccatacggataaaagcgctgcatcgcctgtgactcgtggacaaatgacggtaacgactcataaagatccagccatttatcatcatcagaacgctgcattgttttttcaagcttcttcaagcataaatattgctcatgcgattttgacagccttgtatcaattttcagatcaagatgctcagccagcttagaaatatcgccctcttttttcactagctgttcaattaatgtttcatctgcacaagcgatgatggcgggtttgccgacataccttgcatagctgattgcaaaaagaagatataccagcgttttccccgttcccactccagcttcggcgaacatgacttttttctctttaaacgcccgctccagctgaaaagccataaatacttgctcgtcccgaagatcaaaccctttttcgggaaggatatcgtaaaacacgtcaccaatccaattgttcaattcttcataaaaattctttgttttcgttaaagaaaaaggcaaacgtgatgttgtcacctagttccaacccccaactattcgacattcagaccaccaataatatcattttccgctgatgaatacaataaaaaaacttggcaatgccaagttttttgcagtttacttacgattgatcacatgcgacgataaaaaaggatggtctgttgaataaatatgttctaccgctttttctaaattagtttgcgcatgcgaaatcatagacggagacgattcagtcccgagctccttcagctcgtttgctgttgcgtcaagcgccctttgaataagattaaaatgttcgctgttcagcatgagatcacctctgatggaaataatcatcattgtatgcgaacttttcattttatatacatgctttaccgcatgttatcaccgaaacatgcacaaactacacttgatattccgtctccggattatccgtcttatcaacaatattctatcagggagtgatgttgacatgagttatagaaaccgattagatcagcattctgaactgttccatcacaattggacgcggcctaaacgttctaagtctcaagtaaacggtcacactgaaatgtcccaaaccaacattatattgagaagcaacgcgaaagctcaccgttggtaacgatagaatagggctgaaagatgaaagaagacgcatgcagagcgtcttctttttatgcgttttctgttttcttgcgctgcggccttacttttgaccaatattgataataatccgttttaataaacccgttaaagagctttcgtttcttcgttgcttttctgccatatgcttcctcaaagttttcatttgatgtcagcatatacacagaccaagtatcaagcggctcgaacgccttccccatttctttgtacatctgctcaacggcttttttctcgccgagacgctctccatatggcgggttgccgacaattacgccaaattccagatttgtggtaaagtctttgacctgcatctgtttgaactggattagatctcccaatcctgcttcctctgcattttcttttgcgatttgaaccatgcggtggtctatgtcgctagcgaaaattgtaagcggctgatcataatttgccttttcttcgacttcaagccgcgctttgttccacagatctttaccgatccattcccaatcctctgaaacaaaatcgcgattgaatcccggggcgatgttttggccgattagcgccgcttctatcgcgattgttccggagccacagaaaggatcaacaaacgggcggtccggcgtccaattggttaattgcaccaaagcggcagcaagtgtttctttaatcggcgcaccgccctgatcgacacggtatcctcgtttgtgaaggcctgtccctgatgagtccagtgtaatcaaagcctgatctttcaataaagaaatttcgactttatactcggcacctgtttcttcaatccaatcattggctttgccggactgcagcttgagcttttcgacaattgcttttttgacgatccgctgacagtcgggaacgcttgcaagtgttgattttaccgattttccgataacagggaatttcccgttttcaggtataaatgagcgccagttaatcgctttcgttttttcaaacagttcatcaaatgttttcgctttaaaagaagcaacctgaacctttatacggtcggctgttctaagccaaaggttggcacggcagatggcaagtgcatcaccttcaaaaataactttcccgttatcaaccgtgcattcgtatcctaaatctcgtacttcctttgcgacaacagcttcaatgcccatcggcgccgttgcaattagtgtatacttcttcatcgtatcaccctgtcttttgaaacttttctcttttcaagataaaagctctccttatacgggagagcttgttttcatcattttaaatgtaagtggtctaacgttctgtaagccatgttttgttccgtcgtactgcaaacggctcatcacctcgtactcaggcggcaatcatctatctacagaaagcattctgtccttctctccgttgaattccgttaagaaggttcccctaccaaaatttgggtttctcgctcgaggggtttaccgcgttccactctcaccatttctagtgagacttcgtcactgtggcactttcaaggatactcagccatatccgaagacgtaggcttttttcctgccgtcagtctctaaagactgccctagcttatgacttcgctaggcacgaacactacgggcatctcagcaccgtgcgagcatggactttcctctacagattcaagatctgcagcgattacccgaacgttaagaacatgaattattatataacaactgtttacaatttacaagcgccatttttttcaagcgtgatcaatcataaagcttgctgccaaaaacgtgtttttctaagttagacagccgttttaaaatatcaaagtttgttgtgttagattgcacaggctgttttttgctggcttcttcaagctgttttttcagctgcagattttcctgctgcagttcttcaatttcttgatggaaggtttcataatccttaataatcatatctaaaaatttgtcaacgtcttcttgcttgtagcctctaacgcctgttttaaattctttttccaaaatttctttcgcagaaagctttactttatcagcaagcatctttttcacctcgtatcgtgaatcatcacatatattttttcagaaatctgtacggttgtcaaatttctctctcattgttagtagctgtcttcctccactgtcactctcaagtcatccattgtaataaagtagatgggatagccatcctgttcgcgccttttttccgctgtcccaagcatatacttaggggagccttccttttccgggtcatataaaagcagaagcccgtcggacttatcaatgaagaactgatttttttgtttgaattgaagcgggctttcataaggacggtgagtcaggcttgcttcatagtctgcctgagacagaactgcttcatactgttccttattcggttctttccagttcttttcctgctcgtaaaatggtgtgatgacagctacttttaagtcagggtattcctcctgcaaatcatatgcagcttctgccgcccacagctccgctccaagctggcccgaaattaaaatccattctaatccttcatccaaaaaagcaatcagccgattcttaatggctttttttatgtaatacagcgccttgtcatcctgcttaaatatcccgagttcaaacggtttatagcccgtaattgccagtactttcatcatttcacctgctttaaaaaatggggctcccgtgggccccatttgttgtgctgcattgtttacaccatcaagctgcacgttttccatactagtagtcgcagcaaggttttcctgcttgaaaatgctgatgcgtagccgggtcaacatttgagaaagtgtgtggaaagtagtgaacgtgctgaaaatgctggtggtttacgtttgttgtatgctgtgggtgaatgtgcggcacgatagtcttcgaaaacgtatggtgttcacagcaatgagtaggatggacaattggcgccatcatatgcggtctgcagtgatgcatgataaaatcccctttccataaactttattacaatactaagctatgaaaaataaggggtacatgttctgatgcaaagacctattttaaaagtgtgcaattaagctgtctttaaagtttgaaaacacaaaagcaatcaaaaataccacaacaaagaacaagtaaaaaacacccttatacataccaactctccctttaaaaataactaacgtcattttacaggattcgccgctattctacaacaaaatcaatgtgaattcagcaaaaaaaattcatggcgaaacaagtcgtcttttgcgctttcccggggaatatttaagaggaatatttcctcttcagccgggcaattctcacatgcagtttttcagtttctttctctgataagcatgccgcatcgctaagcaattgctctgctatttgcaatgcttttccggattcttttttcttatgctcaaaatatttcgcgagctctattacagcagcgtatctgcacttctggttttgcgagcgggacagcttttcccaaagcggcactgcttcttccaagcggttttgttttttgtacaggagcgataaatccagccgtgcactgtcctggtcctcaaacgatttttctataagcctttccaactgcttgatcgcttggtccgtttctttatgagccataaaccatttcgccatagcataggcttcactgtgttcttttggcgcatgtgattctgaaaggatttttttagacatatggatgtacaatgaaatgagtgataacacatccatttcattatgatgcaggacaccttttaaaagatccggctcttgcgccttgataaaatgaaagtaaagcattggcgccaagtagcccggtgtgtcttctagcctgcggatgccgagctcctctttttcaaccgtgccaagagatacacggtccattttgtgtttccacaggcgtctagctccatgcaaaagatcaaagtggccaaactccggaagcttcggaagtctgtcacggatcaaggtgtgccttgttttcacctgcggccaatcaaaggctttgccgttgtaggtcacaagtgatgtaatgtcaacctcgcttaaaaagctttggtacaaggcgacttcgttccccggtttgggcaaaagatgctgtttgactgtcactcggtcttcatatactctcgcatgcccaagcaaaaaaatggtattcccagctccacccccaagaccggttgtttctgtatcaaagaaaaagaggttgtttttgttatacccttttgctgacaatgtatgcgacaggccgctttgattccacagtgtgatcacttcttcaagctcagaaaagctgtataacccatggcggtgagaaagcggatattctacttctctgatgaggcaatattcatcttcgaagatgaaaggcttcatgccaaaagcctcccactcttctaaaaacgggatgtcatcaaagtggttttcttgtttgcctgcttctattttttgttctccttcgtcgagcgccatgtgctttttcatccgttggagtttcccttttaatgacatatccggcctccctccttacgacatttgatccaacagctgcaaaattctttcctttgcttttatcccttctatttccgtacctatacaagacggacagccgtcatgacaaggacaatgtgtaatcagttgtttcgccgcttcattaatgtctgaaaaacgtttaaagacttcctccgccaaaccgataccgcccggataatgatcatataaaaatatggttggcaatccggtatgggctgctttgatttgagaaacaacatgaacatcatttcgatcacacatgatatacacagggacaatatgctgcagcacattcgagatgccaagaagcagctgttccagtgtcttttccccgatgtcttcatccgctgttttgatttcgagccaagctgcacttgtatgcagttcttcttccggcaaatgaataggtccagacccaatattttcaaaagtggtcatttttatttttttaaaaatggtcggcagggcattgacagtgacgtctccgtagtgcaatgacgtacggcttttttctttcgttttatcgatttctaaaaccttcagctgaactgccaggtttgcatccgtataatattcgacatcgacttttctgacatacgcctttttatggtcccaatcgagcttctcaacttgatactgaacgccttcatgcaaataaatcgcttcatcatgcaaaagcgtcatcgcactaaaacggtccatttcaccgataatccttacatttgcaatatccgactgatcaactataacgacattttcctgggaggcggaacgcaaactgatgtttgaagcagggaacgactcacttgcccaatggtaccgttcgccgttgcggtgaagaacagcctcttcctcaagatactcaagaatatcactgacttccatgggtccaaattcttcatcagctctaaaaggaagctcataagccgcacactttaagtggtctactaaaataatcaaattctccggattgattcttgcagattcaggcgaacgattaaagaaatattcaggatgccgcacaatatattggtcaatcggtgttgaattggctaccatgataatcaaagattcaccgtgtcttctgccggctcgtcccgcctgctgccaagcacttgcaacacttccgggataccccgtcattacacacacttgcagctggccgatatcaacaccaagctctaaggcattcgtactgaccactcctaaaatgtcgccttctctcaggcctttttcgatttctcttcgctctttcggcagatagcctccccgatagcctctgattgattttgttccaatctcttttttcacaagctcctgaatatggcttaaaataatttccacccgaactctgcttctggcaaaaacaatggtctgcactttgtttttaaggaactctttcgccagttcattcacttctacggttgcgctccttctaatattcagcggtttgttcacaattggcggattgtaaaacacaaaatgcttgcgtccgctcggtgcgccgttgtcatcgaccagccgcatcggtttgcctgtcagctgctctcccaattcctttgggttggcaattgttgcggaagtacaaataaaaaccggatcacttccataaaaccggcagatccgctttagccgccggatcacatttgccacatggctgccgaacacacctcgatacgtatgaagctcatcgatgacgatatacttaaggttttcaaacaaactgacccatttcgtatgatgcggtagaatggcagaatgcagcatatcggggtttgtaatgacaatatgacctgcttttctcaccttttgtctgattgccggagacgtatccccgtcatatgtaaagcttttaatatcaatgcccatttcatcaataatttcatttagctcgctcttttggtcttgtgccagcgctttagtcggaaataaatataacgcccggtttgtttcatcttgggcgatggactgcaggactgggaggttgtagcataacgtttttcctgatgctgttggcgttacggtaacgatgctctctcctttttgcacatattgaaaagcggaatattggtgagtatatagttcatcaatgccccttttcgaaagggccgctttgattctctcgtctatactttcgggcataggccttgtttttgcttcccgaggctcaatttcatgccaattcacaacgttttcatttccttttaaatcagaaatgagttcagtcagtgatttctttttcattctttacacctctttgtcaagtacagtttaccgaatatttgtttgcatggctaggtgcaaattttatacagttgaataaaaaaagcaaggcatacgccctgcttatttcgctttgattgtaaggagctttgattcgcctttacgagcagccttttcgcctgccggcaccattgatcctacagcctcaccattcattataacgattgggatgactgtgctgctcgctttttcttttattaattccaaatcacatgtaatcagcgggtcaccgaccttcactttatccccttctttaatgtgggcagtaaatccttctccgttcatattgactgtctccagcccgacatgaattaacagctcaattcccgagcgagtccgaatgccaacggcgtgtttggtgtggaaaatctgaatgacttcaccttcagcgggagaaacgatttcaccgctagaaggttccacggctattccttctcccatcattttctgtgaaaaaacagggtccggcacatctgacaggtccattactgtaccgtctgccggagaataaataacctcttctgtcaccttttcctgagttttgcccattccgaataattttttcagcaatgtattttctcccttctcattcttcaaccgttatcccttcattcaccactatttaaccacactttcaattttgcttcaatttataacaacatctggcatagacgcataatctggttaaaaaaggcggtggcgaaattggaattctatgatgacaaaaagaacgaactgcaaaagaaagaagaaatcataacggaggcaatcgacactctttttcaatcctcagcgttcggcaaccttataaacggatttcagaacctaatcaactcgagtttaaaggatgtgcagacgaccatacatgtcagagaaagagatactgggctgtatatcgatattaccattccggcgacgtttcgagatggcgagatcgtcgttgatgttaaatcgaggtatctccatgtaacactccaagaaaaacagaaacaccaaaatgaggctacctttacaagcatgacaagaacggttcagctgccttatgaagttcgccaagaagatatggaaacgtcttggaacgagcagacaatgacacttttctttccaaaaaataagcatgaatgaacgattcattcatgcttctatcatttaaaaaagctggtaaatccctttattaaagatccgacctgattcattgcactcattacttgacctgtcgtatccatcattttattaaaatcaaattgcccatttgcttttttgaactgcgacataatgctttgaaattgcgaaggctgctgttgattaggccttgggataggataagggttagaaaatacaggcggctgcataggcataggctggatcggagcataaggctgataataatcctgctgtccataatgctgctgaggcagttgttgctctaaataaccgggtgcagcctgctgataatatccttgcatatgctgaggataataatagcccatttgccgaggatagcttcgagagctcccgttcattgcgattcccccctaaacacaacatatttctcttctatatatgtatgaatgacttctattgtttgtgtcacaagtgatgattagcatttgtcaaattgtgtcgaaagtttaaattttttaaaaacagaaaaaagtcgaatcattatggtaccatattttcaatacagatgagaggggatgcaccataatgaacgtatcatacttaagcaaacgttttgcagaaatgaagaaatatgaaacagactgtatgaataaactgatggactttgccaagttcctctatattcaaggacatctcagcataactgagtttcgtaacagtatgaaggttctcgaagcaaatggagcagaaagcccggcatatgagatgaattaacgtccggccccctataaaaacgaaaagaagacagccttttaccggctgtcttctcttgcaatttcatcctttactgcgtgcaatgtataaaggactgactcagtgatgtccttgaatcgttttttatgaatatgatgaacatatgattgaaggaccaattccaggaaattatcttttacggtctcaatttgctctttatgcacatattttggccggtgggcttttatcaattcaagagcaccctctgcccagcgggccgccagttcatcattctcttcaactgcaggctttatcatctcaaaaaaatcataagaatgattactgttttttccttcctgataccgatcagcgcctttttcagcaacttcaatcatttgctcggtcatttccagcaaagtttgtgatagcaatatctttcacctcaatgcctatcgtaccaaatttcactcgcaaattcagccgatgcggtataccttctcaaacgcatacctgtgttcaggcgattgatacagctcatttatacaaatatgaagatctatgatttcttcttccagcacactcaggcgatcattttccgtttcccgcatctcagcctctaatgcatttacagaatgattcaggctttgctcagctcgcgttaattcatcttctatatcagaaagcatacggagaatatctgtcttgcatacataaccggacattcgtgtacctccctttccttgtctctcccgcttaacattctttgctctcaaggctctttccttcctcatgacaaaactagaagcaaatcgccaaacaaacaggtattccacgaaaagctgaagttttcgacaaaaacacccgcaaaaattgtatgatcctcctccttaatgcaaacgatacttgtgaggaggtgccgtatgaaaacaagaccgaaaaaagccggccagcaaaaaaagactgaatcaaaggcaatcgattctttagataaaaaattaggcggcccgaaccgcccttctacgtaagaagcaaggaatttccttgcttctttattttttcagccactgctccaccgcaaaaagcgcatgaagctggcgctttttatgtaaataccagtctgtcaattcaatctgcttcggcaattcctcgcgcctaaagaacgttttctttatctttccatgaaaccaatctgttttcgttccgtctaatgagtggattaactcagggtagcatgtccttagcataggagatgttctttttgtaatcccgatcatcttttccatatcaaaacgggaacctgtgtgcggcactgtgtgcaaaaagtgataaaaagaggagaacaattctggcttgaacagcaattgagacagctgctttcccagccttatcctttcctccgcctttgaaaagcgtttcactgaaatgccgtaaaaaaacccatttgaggaaggaaaaataacggtgttaaaatgaaaccagtcacttaaataaaaaggaatcgtgtcaaaaacattctttttaaacgaaggattttgtataataggtgtttggatagtgttttgttcatttataatgagggcatacattagccgctccgtatttcgctcatgccaaaaacgggtccattcttccgacataaattgtgagacgccaaacacatgcagaagatgaaacagcggtttcccgactctttttgaccagtggtataaaagaagctgcggataggcatccgaaaaaataagccagttcgctctttcataggctaaaaagaaccatttttgctgtctctcacggagtccaagctgaaacagactgccttttaaatcagtcattgaccagcctgcattacgagaaacgaaagaagccaaaagcgaccatttgatttccggatgacggtcgtaaaatgctttataagcatttgttcttgaaatgttatccgcgttttttatttttgtctgccgctcaatccggctcagaagctttctgatgatctgttgttcttgcacgttcattcacttccgtcatgattagtttaataaggaggatgagaaagtgattcggtatcctaacggaaaaacatttcagccgaaacattcggtttcatcccaaaacagtcagaaaagggccccgtcttacagtaatcgcggaatgaccctcgaagatgacttaaacgaaacgaataagtattatctgacaaaccaaattgccgttatacacaaaaagccgacacctgttcaaattgtaaatgtccattatccaaaaagaagtgccgcagtgattaaagaagcttactttaaacaatcatcgacaacagactacaatgggatttacaaagggcggtatattgattttgaggcgaaagaaacgaaaaacaagacctctttccccctgcagaattttcatgaccatcaaatcgagcatatgaagcaggtaaaggctcaagacggtatttgttttgttattatatccgctttcgaccaggtttattttttggaagccgataagctgttttatttctgggacagaaaagaaaaaaacggcagaaaatcaattcgaaaagatgagttggaagaaacagcttatccgatttctcttggatacgcacccagaattgattatattagtattattgaacagctttatttttcgccatcatctggtgcgaaaggttgattaacgaaaggttgagatgttatgtcagatcaatttaacagccgtgaagctcgacgaaaagcgaacagcaaatcgagtccttcaccgaaaaaaggcaagaaacgaaaaaagggcggattgtttaaaaagacccttttcactttactcattctgtttgttttaggcgtagttggcggtgctgttatatttgccgtcatggtttctgatgcgccgtcccttgatgaaagcaaattgaagacgccttattcatcaacgatttatgataaaaatggaaaagagatcgccgaagtcggcgccgaaaaacggacctacgtctcgatagatgaaattcccgatgttgtaaaagaagcctttatcgcgacagaagacgctcgtttttatgagcaccacgggattgaccctgtccgtatcggcggtgcattagttgccaactttaaagacggcttcggggctgaaggcggaagtacgatcacccagcaggtcgtcaaaaactcccttctttcacatcagaagacgttgaaacggaaggtgcaggaagtatggctttcgattcagctggagcgcaattactctaaagatgaaattttagaaatgtatttaaaccggatttatttttctcctagagcatacggaatcggaaaagcggcggaagaatttttcggcgttacagatttaagcaaattgactgtcgaacaggctgcgacgcttgcaggaatgccgcaaagcccaacagcgtacaacccggtcaaaaacccggataaagcggaaaaacgacgcaacatcgtactcagtctgatgaaaaaacaaggatttatttctgattctcaatataacaaagcgaaaaaagtggcagtgaaagacgaaggcgtcgtgtcacagaaggaatatgaaaaagcaagtacaaacaaatacagcgcatttgttgaagaggttatgaaggaaattgatgaaaaatctgatgtcgatccatctgctgacggattaaagatctatacgacattagatacaaaagcacaagataaactagatgaattaatggacggagacaccgtcggatttactgaaggcatgcagggcggcgttacccttctcgatacgaaaaccggagaagtgcgggcgattggcgccggaagagattctacggttggtggctataattacgcgacccaagctaagcgacagcctggatctaccattaaacctattctcgactacggtccagttattgaaaataaaaaatggtcaacttacgagcaaattgatgactcagcttacacgtattcagatggaacacctattcgagactttgaccgttcctataaaggggtcatgtctatgcgtgaagccctcgcccaatcacgtaacattccggctctaaaagcattccaagcagtcggaaaagatgcagcagttgattttgctaatggactggggctcggattaaataaagaaaaagtgtatgaatcatattctatcggaggattcggagaaggtaatcccggtgtctctactctaactatggctggagcatacagtgcattcggaaataacggaacatataacgaaccgcattttgtgaaatcaatagaatttaatgacggcacgaagcttgacttaacacccaaatcaaaatcagcaatgagcgattatacagccttcatgattacagatatgctgaaaacagctgttaaaacaggtactggacagcttgcacaagttccgggagtggaagttgcaggtaaaacaggtacaacaaactttgatgaagcggatatgcaaaaatacaatatcgcacaaggcggtgtaccagattcttggtttgtaggatatacacctcaatataccgctgctgtttggacaggtgtagattctcaaaataagataggaaaaaaatctttaaataaaacagagcaacagattgcaaagcgcatcttcgcccagctcatcgccgatgtcgatgacggaagcggatcatttgagaaacctgacagcgtagtggaagcctctgtagaaaaaggctcaaaccctgcaaaactggcagggccaaatacgccaagcgataagaagctcacagagtactttgttaaaggcacagctccttctactgtttctaaaacatatgagaaagaagaaaaagaggaaacagctaaactgtctggtttaaacgtgaaatacgataaagacaatcaatctttaacgttaagctggaattacgacggagatgcgacctttgctgttaagcaatctgttgatggcggcagctactcagaaattcaaaacagctctgcaaaagaggcagtcatatcgggtgtgcagccaggatctgtgtacaaattcgaagtaacagccgtcagtgatgatggcaaaagtacagcttccacatcctatgaggtgccaaaagctgaagacgatgaagataaaaaagaccagcaacaaacggatgatgaaaaacaagatgatgagaagactcaggatgatacacaaactgatgattctcaaaaagatgacggtcagacggatcaagatcagacagatgattcaacaaacgatcaagacaaaaaacaagacaatacgaacaccaatccgtccgacaacaataaccaagaccaatcaaacgataacgataacgacaacagtaacaaccaggatacgtcggatggtgattcgaactctggtaagaatgattcaacaggttctgacacgaataaaaataaaacagacacatctaataaaacacaaacaaactcatcatccattgaaaaaacaaattaaacaaaaaagccgtcacctttggggtgatggcttttttggtacacaataaaaaacctcccgttttaacaggaggttttatcgattcatcgcatgatatttgtaaaaatgctttttcatttcggtaaacagctcatcaagctgaataaagcaatggtattgggtcggcttaagaagaataaattccactcgttcagcccaattaatcggctttgcgggatatgatttctccctcaattcttgccaatcgagcgatttcaccggctcacctgctgtccaatgtaacgaagccagcaaacacacaatgccctttaacatttcgttttggtcacatctcgattttcgtgtttgaaagactgggagaagtgatgctttgatgtcatcccacacttcaaataaaagcggaacgtatttcccgctgtcttcccatggcaaatcgccttgtaattccgtgcagaaatcaaaatacacgggattggtctgcaaggttttcttcatatccgaggaactcttctggccaagactgcgcaagtattgctcataagaagccaacacttcttttgcttgcgtcatcgtttcaccagtccttttttatccctcttctgcccttctctgcacaaagaaagcagcggacactccgcacagcgcggagattgggctttacagtgatatctgccgaagaaaataagccggtgatgcgtaacggaccagtcttctttgggaaccttgcgcatcagcgtcttttcaacttccagaaccgagtccttccaccggcaaatgcccaatcgtttgctgactctctccacatgggtatctacggcaatggccggcacaccaaacgcaacggataccactacgtttgcggtctttctcccgacccctggcagtttgacaagctcatcgcggtctctcggcacttctccgccgtaatcttcaataatcattttactcagcttttgaatatttttcgctttattacgatataaaccgattgatttaatatcctgctgaagctcttccagcggaacagccaaatagtcttccggccgtttatatttttggaataatgttttggtcactctgtttacaagtgcatctgtacattgcgcagataaagctacagccaccactaattcaaaaggattggaatgaaccagttcacactccgcatgaggaaacatgtcacctatcttgtctaaacagaattcaatttgttttagatttaacacgattgtcaccttttcactttattgttcaagccaattgtaaaaaggaacctgccttttatactctttttgcggttcattctgctttgcttgtacacgccggaatttttggctgtgtatttttgcctgctccacagttttaagcccgtttttcttccattcaaacaaaatccggtcaatgtagcggaaactgagttttcctgatagtacagcctcttttaacgcgtgtttgatcagttgtgcgtcatgctggtcctggtcctgccagatcgccagcgtttcacactccaaaggcgataacggccttgcgaactcttcctcaaaaatggtataaaggcttttttgttccccttctgcttttctttcctgtgtttgattctgtgcaagctgaatatactcgtacagcttgccccataaaggctgaagagaatatttctcaaatttgatgccgttttgatcctcgcattcttcaataaacagaaagcctttttgaataaacatccgcaatctgtttgtgcattcttcaacagaaattgacataccttcctgcagctgattcggtgtaggaaaatatgatcctttttctaaatgcattttaatttttaacagcagaataagttctgtttcattaagcccaagctgtttataatgcgtgagcagaagattggggatggttgatgttccctgctcctgcatatcaataaattgctgttttttcatcgtcacacctcttactgtaaaggattgtgattacccctttactgtaaaaagtctcccttgcaggagactcttttttgtttcatttgaatgtattacggatacagacggtttaacagtcttgggaacggaatcgtttcacgaacgtgaggcgctccgctgatccaagctactgtccgctctaatccaaggccgaagccggaatgaggaactgatccatattttctaagttcagcataccatttatatgcgtcagaatccagtccatgttctttaagacgcgattccaaaagttccatatcgtgaatccgttcagacccgccgatgatttctccatagccttccggcgcaatcaagtcagcgcaaagcacaacgtcctcacggtcagaagccggctgcatatagaacggttttaaggacgtcggatagcgagtgatgaataccggtttgtcataatgttcagcaatcgctgtttcatgaggcgctccgaaatcatctccccactcgatatcgtcaaagcctttttctttcagaaattcaatcgcttcatcatacgtaattcttgggaacggggctttgatttgctcaagttttgacgtgtctcttcccaatgtgtttaattcaattttacaattcttaagaactgattgcacgatgaaagaaacgtaattttcctgtacttgaaggttttcttcaaattctacaaacgccatttccggttcgatcatccagaattcgattaagtgacgctttgttttagacttttccgctctgaatgtcggtccgaaagagaatacttttcctaaagccattgccgcagcttccatgtagagctggccgctttgagacagatacgcatcttcatcaaagtactttgtcgcaaagagttctgttgtaccttcaggtgcgcttccagtcaaaatcggcggatccacttttacgaagccttcgttattaaagaattcgtaagtcgcgcgaatgatttcattacggattttcatgatcgcatgctggcgctttgaacgcagccataaatgtctgtgatccatcaaaaattccgttccgtgttcttttggtgtaattggataatcggtcgcttcgtgaatgacttcaatatctgtcacagcaagttcatatccaagcggagaacgctcgtcctctttgacaatcccttttatatagagcgacgtttcctgcgtcactgatttagctgtttggaaaatgctttcttccacttccgcttttactacgacaccctgaataaaaccggtaccgtcccgaagctgtaaaaacgcaattttcccgcttgaacgcttattagcgacccaagctccgatcgttacttcctcacctacgtgcttgtacacttggttgattgttgttttcaacatatttccctccaaaacaagaaagacattcggaagctcattgccccgcgaactcttttatcatcactttattatacccgctcttaactaaccgggtcaatgcagataaaaagcggcttttctgtcagccgctttttgatctgttagctatgtttttctacaaaacgcttgattctttcaatggctttttcaagaagatctaacgatgttgcataagaaagacggacattctcaggagagccaaatccggatcctggaacaatcgcaactttttcctcctcgagaagcgctttaacaaattcatctacatctttgaaaccgcaagattgagctgcctcttttgcatttgggaacaagtaaaaagcaccttccggcttcacacagctgaaccctgggatttctatgagctttgcatagatcgtatttaatctatgttcaaatgcttctctcatttcttccaatggctcagaaggcccgttataagcagcaatcgctccgtattgtgcgattgatgtcgggtttgacgtgctgtggcttgcaaggttcgtcatcgctttaataatgtcttcagagcctgccgcataaccgattctccagcctgtcatgctgtgggacttcgatacgccgtttataatgaccgtttgctctttcagtctgtctgacagctgtgcaatggaaacatgtttctttccgccgtatgtaagtttttcataaatttcatctgacacaatcaagatatcatgttcaaggcacacttcaccgagcgcagacagttcttcttccgtatacatgacaccagtcgggttgcttggagagttaataacgattgcttttgttttttccgtaattgcatttttcagctgctcaggcgaaattttgaagtgattttcctcaagcccttctacataaacaggctttccgccagcgagtttcacctgctccggatagcttacccagtaaggcgttggaataataacttcatcttcttcatccaaaatcacttggaaaagggtatacagagcatgtttggcaccagtgcagacaataatttgagacggtttgtattcaatattctggtcgcgtttaaatttctctgcaatgctgtttttcagttcagccaaaccaccggaaggcgtgtatttcgtatggccctcgttcatcgaacgcacagcggcatcaataatatgctgcggtgtattgaagtcaggttcgcctgctcctaagccgatgacatcatggcctgcggctttcagttctttcgctttcgctgtgattgccagtgtggttgatggtgttaatgcggatactcttcttgccagtttcaacttgaactccccctaattcgtcttaaggcgtgatatttttgagaatctttccagttgtaaagtccacataacttaaactgtattgcccttctttgtctaagtacgtcacttcccaaagcaggacgtttccttctcttgccagatgaacctctttttgctttgaaaccagcccttcatcctttatgattttcgccgctttgtcttcagagattccctctttcgcttcttttgagagaatttttgcttttttatcagcaggaacccagacatataatgcagtgccttttttatccgttccctttacaacataatatttttcttttccgacaaatgtttcgacttgatcaacattggcgagatcggtttcttttttagcttcagcagctgctgcttcgtgcccctcttccttttgtgccatggctgatttataaatgcttgccgagacaagaagtactgctaaaaaaataataccaaaaatgacggtaaatattaatgctttttttctcatcttctcacctacgtacgataaatggtaaaaacggcttggtttttgttttcttcatccagtgcaaggccgaacatcagattttctcttttcagtgtacgattcaatgtgtccacaattttatacagatcatcagaatgctctacattaattgttgaaagaatttcgattttactttccattttttcatcctccagtttgaacaaatattgtaagtcatactccatttcaggacacgccatactagtatcacagagcgggaaatccgcttttaaataaaacaccatcctactcccacaccgcaaaagccgctttatgcggcttttattctttttcccctgcaacataagcttcaagctcgctgtcagtcatttcggatactgaggttgtcggcaaggcatcaagaaacagccggccgtaaccagcggttttaatccgtctgtccaatataataatcgttcccttgtctcccgcagaacgcagcaagcgtccgattccttgcctgaaggtcagcacagcttccggtaatgacactgtttgaaacggattctttccttttttgcgggcaagctcacattttgcagcatgaagcgggtgatcaggggaccggaatgggagcctcacgatcattactgtcgtcagctcatcaccagggaaatcaacgccttcccaaaaatgatttgttccgagcaggatcgcctgattggatgttttaaaagtcttcatcagcttgccgggacttccgcctgtaatcccttgtgccaagagctgaatgccggaagcactcatgttatgcttaagctcctggtgaacctttttcagcatatcatgggatgtaaacagcacaagaattttaggctgtttttcctttgccatcagttcgatataacgggctgtatcctgtataaattcaggttgccctgtatcctgaattgatttcatttcctttggaatcatcacctgcatacgctcatcgtaagaaaagggtgactcaattctcattgtccgcgggaaaaagtcactcagtcccagtcgttcaatcataaattgaaaagaaccttcgactgtaagggttgcagatgtcagcaccacactatttttgcgcgcgaaaaactgatcagccagaagttcaccaggttcaagaggctgtgcgtaaatggccactgcatttttcgcaccctttgcatctatttcaatccaaaccgcttcatcatcatcagacccaaagaagagcttctgcaacgtctgacagtaatgctgcaagcctttcatgcttctttggtattcatcggctaaaaagacggttttgctcttcatacccttcaaatgtttttccatcagggatgactgcgcctcaaaaagctgctgcaaatttgtcagcatggaacaaagcctctccgcaccatccgttaagatcgaccagcttttatcctggctttctttgttcaccttaaacactagacggtttaagtcttctttaggttttcttcgtttgacaaaagaatgtacagagctgaagaaagcatcactttctgcttgaacgtgctgaagccactcttccaattcgaaaaatgaatcaaccggcaggctgtttcgctggaatagctgtctcatcttttttagaagtccctgctccttcagagtgccgattctgctcaatttcgtatgcaattctatgtacgtggctcttttccctaaatgttcgcttgccgcacgttcaaaatggtgtgcttcatcaataataaatgtcccgctttcgggaagcctttttttctggctgccttcatcggtcagcaaaagggaatgattggtgattaccaaatcggagcgcatagcaatctgtttggcccgctcgtaaaaaccgatcacatgctcactgcgacttcttttataggagtcatcgtcataagccaatctgtcccacagcaattttccgcctgaaggcaaattcagttccgctacatctcctgtatttgtctctgtcagccaaacaagaagctgtgcctttgtcagtacggcatcataattatcatcttcttcatgaagcacctgctcaaatttatacaggcataaataatgcgattgcccttttaaaatcgccgctgttaccggaaatggaaacagatcttggacaatcggcaaatcctttgtgagaatctgctgctgtaaaagcgtcgaatacgtgctgattatgaccggcttttttgatttcttggcaaaaagcgcagccggaataagatagccaatcgtttttccgatgcctggaggagcttcaatcagcgcatgctcacgattggcaaacgcatcagccacctctctcatcatcatcatttggccgtctcttttttcatacccaggcattaactctgacagcgctttttcatttcccgcttcccagctttcgatctcaaatgagaagttctcgtcctcatttatacgaacatcgatagcttcaggttctctgacagaaaacgaagaaaagcgcgtatagcccggtatctcggtatgtctgttttcattaatgaacatatccaacaaatgcgtcagatcactgatgaaatgctgcgaaagccttcttaactgctttaatgtcggataaggaagctgccgcagcttttcaaggatttccaaaaaaataagccctgtcacttcagcatcgctgtcagcccggtgcggctgatcatgccgcagctgaagctcctcgcttaattccgtcagcttatacccttcaaatcccggaaaaacaatgcgtgagagctcgacagtatcaagcacttcacaatctgggagctgaaagcccgccttatgtagctcatacttgacaaatccaaggtcaaaatggatattgtgggcgacaaaataagcgccgtcaagcaattggaatacttcttcagcaactgcttcaaatggctgttcattttctaccatttgattagagattccagtaagctgctcaataaaagcagggattgatttatttggattaatgtattttgaaaaccgctcagtaatttgtccattttcgattacaaccgctgcgatttgtatgattttatcgcctttcttcggcgaattccctgttgtctctacatctataacaacgaaccgttgcttattcattaaaatggacacctcaattcttgcatacgacaaaagtgtaacacgttttgtacggaaatggagcggcaaaaccgttttactctcaaaatcttaaaagaaaacccccgataaagggggcttttcttctacaaaattgtacgggcgggttcgtttcccagcatttgttcaattttgttttgatcattcagaacagccactttcggctcgtggcttgccgcttcttgatcagacatcattttgtaagaaataataatgaccttatctccttcctgcacaaggcgtgcggctgcaccgtttaagcatatgacaccgcttccccgtttaccaggaataatatacgtttcaagacgtgctccattattattattcacaatttgtactttttcattaggaagcattcccacagcatcaatgagatcttcatcaattgtaatgcttcccacatagttcaggtttgcttccgtaacagttgccctgtgaagtttgccgctcatcattgttcgatacatattatattctctccatttctcgaatatcaataatgatgttatctattaaacgcgcttttgaaaaagcaactgcaacagcgagaatcatctttccagcaatttcattcacaggctcgagttccggataggaataaagctctacatagtctatggttccgctagtcgtttcaatgatttcttttgcagcttttatcaccgcttcaggatctctttcaccggcttggatcagttccgcacttgtttgaagggcccgatacagcttaggcgcttcttttctttcctcagctgttaagtatacattgcgagagcttttggctaagccgtcttcctctctgaccgtatcgacaggaaccaattcaatatccatgaagaagtcactgattaacccatcaacaacagctacctgctgcgcatcttttaaaccgaaataggcacgagtcggcttgactagattgaaaagcttcgtcagtacgatcgcgaccccgtcaaaatgtccttctcttgagcgcccgcataacacgtctgtgcgtctttctacatgaatcgtgacattcttttcaccgggatacatatccttagtatctggcgtaaaaagaatatcaactccggcgttttctgcaagagctgcatcccgctcaatatcgcgcggatatgcttcaaaatcttcattagggccgaattgtgcaggattcacaaaaatactcataataacggcgtcgttttcttgtcttgctttgtctgctaaggttaaatgcccctcatgcagaaaccccatcgtcggaacaaatccgattgacttgccctctgaatggtattgttttatggcttctttcagctgtgtaatatcagtaatctgtctcatcttattttcccccgtacaagccgtcaagcactgtctggttcatttgaaaggaatgcttttgttcagggaaagcacgatgtcttacatcctgaacatatccgctgattgctgtttcgatggtttcatcaatgcgcgtatattgctttacaaatttaggtgttctctcaacaccgtggccgataatatcatgataaacgagaacttgtccgtctgctttcacaccagccccgattccaatgaccggtatgcttagcgtctcggcaattttggctgtgagttctgccggcacacattccagcacaagcatcatagctcctgcttcttcgcattttatactgtcttctattaattttttggcgctttgttcgtctttgccctgtactttatagccgcccagtacgccgactgactgcggtgtcaaacctaagtgactgactactggaatgcctccaagcgttaatgcgcgaatggattcaaacacgccttctccgccctcaagcttcagtgcgtcagctccgctttcctgaacgatagccgctgcatttttcagcgtatcttccttggacaggtgataagacataaacggcatatctgtcacaataaaggtattcggcgcaccccttttaacggcttttgtatgatggatcatgtccgcaactgtcacaccgacagttgaatcaaggccgaggacgaccattccgagtgaatcaccgactaaaatcatgtcaactcccgcttgttcagcaagtttagctgccggataatcataagcggtcagcatgacaatcggttcttcagactccttcatttttagaaaatccagttttgttttcatgttttctcctcctcatgtttagaggagatgatctgccgttttcttctgcaagccaaaaaaccttccgttacaacgagaaggattcttcactttctaaagttcggcgagtttcatccctctgtcccagtccttttttggatcaaggcagactgctgcaatgtctatctattttaacaataggtgcagttcgcaggcgatactgcccaatggaagtataccaaaatcaacgggcttgtaccaacacattagcccaattcgatatcggcagagtagatttttttaatgccttcgttcgtttctaaaagcagaacgccttcatcatctatacctaacgccttaccgtaaaaggttccgtttaacgttctggctctcatattagtgctaataccgagcgcatagctttcccataaaagcttaatcggcgtaaatccgtgcgtcatataatcccggtaccgtttctcaaagcatagtaaaatatgctggatgacgccggcccgatcaattttttccccagcagcttggcagaggcttgtcgcgatgtccttcaattcatctggaaaatcattaggctgctggttaacgttaatgccgatcccaatgatcactgaacgtacgcgatcttcttcagcctgcatttccgttaggatgccaactgttttttttccgttaatcaaaatatcatttggccatttaatatccgtttggatgcctgctgcctcttctattccctgcacaacagctactgcagcaagaagagtcagctgcggtgttttttggagcggaatgtcaggccgcaaaatcaggctcatccaaacgccgtttccttcttgagaatgccataccctagacatccggccccttccggctgtttgtttgtcagccaccacgagggtgccttccggtgcgttattattcgcgagctcatgagccgttttttgcgtgcttgaaagaacgtcatggtaaataagatgctggcccatcacttccgtttttaatccaaaacgaatttcgctttcactgagttttccgggttttttgatgagccgatatccttttcttctaacggcttctacttcataaccctctttccgaagctcttcaatatgcttccacacagcagttcttgaacagccgagagcatcactgattttttggccggaaataaattcattgccggcctgagaaaataattcaataaggtcttttcttaatgttgaccgcatgtcttcagccactcctctatgtgtttcttttgattggagagcttccctgtcacaacagcctgctcgatccgctgtaattcttccgacacccattttccagccggccggtttcgaagcgcaagcaagtccttacccgtgatatcaagatccttaaggcttttgatcggcaggttttgataagcgtactgaatgtccttcagtttcttttcatccagtttttcgttttgccgaagctgcgatactttggccgctgagagcagtgctttttccccagctctgtacattgtcattgcgtcaaggctctggccaaacgtatcggcaatgtgaatggcttccttaatcacttttcccgggagcttccaacctttcaggaaaaggggcgcgtctttcaagactatgccaaggttaattaaaagagcagcccaaagctcctcacgggatgttaaagagaagaatggaaactcactcgttgaaatcaggttttctcgtttatgataaaaaccaggaagctcttcatacaatctcgtttgaatgagtgtttgaagcgcctggcgagaagctcttccctgcagcaatttctcgaactctatagtttttcgttcgactgaaacatgggagaggagtgatttttctttcgcaatggcttcttctgtttccggtgaaagcgtaaagccaagctggctcataaagcgtacggctctcagcatacgaagcgcatcctcttgaaatctatcctcaggctttccaacggttcgaatcactttctgatcaatatctttcttgccgccaaaataatcaagcaccttcccgtccgctgtcatggccatcgcattgatcgttaaatctctgcgttttagatcctcttctaatgatgagataaattgcacttctgacggtcttctgaaatcaacataatcagattcagtccggaatgtcgtgacttcataggtttcatcctcccagagcacaataatggtcccgtgctctttgcctacatcaacagtccgctgaaacagccgttctacttgatcaggtgccgcatctgtcgcgatatcgacatctccgatcgttcgtttcatatagctgtcacgaactgcgcctccgacaaaataagcctgatggcctgcttcgattaagatgcggagcacgggaagtgctttgataaaaactttttccatgtgatcactccggttctgctaaatcggcataaatctgttcatactggctgacaatttttttagaagaaaattcattttcaagcatctctattgccgcctttgtaaaacgattgcttagctgttcatcttctaaaatgctcatcgcgcgggctgttgcggccgtaacatcaccgacatccaccaaaaatccgctcacattgttttttataacctcagggataccgccaatgtttgttccaatacaaggcactccgcaagccatcgcttcaagcaggacaaggccaaagctttctttttcagatagcagcagcttcaaatcgctaatagaataaagctcttcaacacggtcttgatttccaagcattaagacttggtcttccaagccatattttctgataagctcgcaggctgtcgatttctccggaccgtctccgactaaaagcagcttcgctttcgttttgccagcgatattgcggaacacacggatgacatcctgcacgcgtttaacttttctgaagttggacacatggatgacgactttttcatctggtaaaattccatgtttctctttaattgccgctgtgtttttcttcagatacacgcgctcgtctataaagttataaatcgtttcaatttttttctccggtttaattaaatcgtacgtttcagccgcaagcgctgaggagacggccgtcaccctgtctgatgactcaatagcaaaacggatcagatcttttagagacggatcataacctaacaccgtgatatccgtgccatgcaaagtggtaacaatgccgatattgcgtttcagcatttgttttgcaagataggcgcaaacggcatgcgggagagcatagtgagcatggataatgtctaaattctcccgttccgccacctcagcgattttgcttgccaatgtcaaatcatacggaggatacttaaaaacagcatattgattaacctcaacttcatgaaaatgaatattgggatgatatgtattcagtctaaacggaatgcttgatgtgatgaaatggatttcatgtcccttttcagcaagctgcttccccagttctgtcgcaatgatacctgagcctccaacgctcggatagcatgtgattcctatttttagttttctcattgttcgcccccaagcacatcatgatcaagcatcagcatccgtttggaaaagaaaccttcggcatactccacgcccgcttctttaccgtaaagcttttctctcgcttcaacgatttcaatatacccattcgtcagaggagtagaaacggaatcctttgacgggataaactggcttttgtaggcgttgaggctttgtttctttgcctctattgtatccgagatatcaataacaaaatccggctgatgaaaaccatttatcatataatagtaaaccttgctgactttatgcgccggaaggcttttttcgtctttatatttatggattccggcggaaaagatcgcttcttccaccagtgcagccgcattggcgtgatccggatggcgatcctttttatacggcataaaaaccgcttttggccgacagattctgatgacagtgacaattgaccgaattgcctgatcactcattattaggccgcggtctggaagcgttagctgaattcttttatctgcgcctaatatgcgggctgcttcagctgcttcttctttacgcaaactgaccgtaccgttagaagagagttccgcttctgtcaaatcgcatatcattacttttttttcctgtttgacaaacttcgctattgtgccgcccattccgatctcgacatcatcactgtgggcgccaaaagcaagaacgtcagcattatacattcggctcttctccccgaagaaggtcacggaattcgaaaacaccttcatcaagtgtgcgcacaagaatttccgcagtacccatatttgtggcgagcggaatggaatacacatcacataaacggattaatgccgagacatccggttcatgcggctgcgcggtcagcgggtcgcgcaaaaaaatgacaagatcgagtgcattggcagcgatcagtgcaccgatttgctggtctccccctaaagggccggattgaaaacgttcaatttgaagacctgtcgcctcatgaattttcaaccctgtggttccggttgcgtatagatcatgattctttaaaatatcccgataggcagtcgtaaattgaaccatatcctgttttttcttgtcatgcgcgatcaaagcaattttcattgtttatccccccgtctaatcaatgatattttctaaaccatacacaagctgatcaatcttcatgacttgttcgactgacagtttaacgcctgacatgaaagaagcacggttataagaatcatggcgtatctgaagcgtttggccatccatgccgaacatgacctcctgatgcgcgatcagtcccggaagacggacgctgtgcaagcgaataccgttttgctccgctcctcttgctcctgggagaatttctttttcatccggatgtccttgctgcttttctttacggacttctgaaatcatttccgctgttttaagcgcagttccgcttggtgcgtcaagcttctggtcatgatgaagctcaataatctcaacatcctcaaaatagttggcagccatttttgaaaatttcatcatcagtatcgcaccgagcgcaaaatttggcgcgatgatggctccgatccctttttcttctgttaaagatgtgagctcttttaaatcagcttctgagaaaccggttgttccgacaactggacggactccgtgctctaatgcaatttttgtatgtacttttccgatttcgggcgttgttaaatcaatcaagacatccggttgtgtttctgtaaaacaggcatggatatctgtataaatgaaagcatctgactcaacaggcatcacatcagataatttttgctgatcgtatgtatggtctatggccccgacaaggtcaaaatgaggtgttcgttctgccaatttaacagcttcctgccccattcttccacgcggtcccgcaatgactactttaattgtttcgtttgacatctcgatctcctctactttccttcttcttttctggtccagcgatctttatctcttgtattaaatttatgcatgactcggtcgtgggcttcctctaaagagatatcaagggagttggctaaacaaaccaatacaaatagcacatcgcccatttcctcttccatgcttttatcatcttcagtcgctttttttggtttttctccataacggtgattcacttctctggcaagctcgcccagttcttcagtcagcctcgccatcatggccagcgggctgaaatatccttctttaaattggccgatgtaacagtctacttcagcctgtatgtctttcattgttttatcactcactgaacgaaacctcctatcatcctcttacatgttagctaattcagatacgtttgacaaatgtttaagcacgtttgctgttttctttttcatccactataatataaacgctatctaatggaaggaaaaggggttttatgtgatgcttggagaaattagattaaaaaacatattttttattttaatcggagcggcaattttttcatttggcttggttcatttcaatatgcagaacaatctggctgagggcggttttacaggtattacacttttgctttatgcccttttccacatcagcccctctatatcgaacctggtgttgaacattccgattttttttattggctggcgtttgctcggcaggacaatgtttgtttatacccttgtcggcactgtagccttgtctttgttcctcagcatctttcagcgatatgaaatccatatgccccttcagcacgacttagcgctcgccgctttatttgccggcgtattcatcggagccggcctgggaattatttttaagttcggcggtacgacaggcggtgttgatatcatcgcacgtttagtgaataagtattttgggatcccgatgggcagaacgatgtttgctttcgatgcctgcgtcatcattttgtctttgcttacttatctctcctataaagaagcgatgtatacgctggtagctgtatttgtagcggcaagattaatcgattttattcaggaaggcggatacgctgctaaaggcgctacgatcatctcttcgaaaaacgacctgattcagaaaaagattcttgaagaaatggaacggggcgtcaccattttgaaaggacaaggctcctacacaaaagaggatatagatgtactttattgtgtggtgccgaaaaacgaattggtgatgctgaaaagcgtgattaactccattgatccccatgcctttgtagcggtaagcgatgttcacgatgtgctcggagaaggatttacgcttgatgaaaataaaaatccgcttccgcgctgacatgtaatagaaaaaaggcggctgaccgccgcccctcacccttatttagggtagtccctttttttcagcttgtttttttccgccttgtactttctgtaaccgacataggtaagagcagtaatgatgatactgccggttgtaatcatcacccagagtaaagacggatcggcatcatcctcctccaccctgtcaaacacatttttcaggtcatgctgaagaagggaaagccgttcaagcttcgtgctctctgtcatttgctgaaattcctcttgctcaataacatctatatgttttccgactgtttcaagctgatcctctgatacatcgattgtaagactggggtaaatcaagtcatataaactgataaattcattccatttttcatgaaagcttatgcttccattcttctggacatctcgcttcagctcagtaaaagcttccataatcggtttttccagtgagccccaaagcgggtcagaccgattgtcaaccgcatccatcagcattctgaactgcgcggctgctctgagtttttgtgtgtctgatgtatcagcttgctttaaactccgaaccatatcattatagcccaatgtgatttgacgaatttgggctcccgttagcatggggtcttgctgttttttctcagcggattttaatgttttttcaaaatactccaagacttgaagcgcctcttcatatttcgcctgtcgggtcatttgaaagactgtatcggataaatcattcaattcctcgaggcttccccgctctgcagccttggcatttccattataaaaaataagtgcaatcaacaaacagatcgtcagctttcgtttcatgcaggtccctcccactctctctccttacagaatatgaagaaagggacaaggatagaccaacattgtctttacatcagctcaagcttcgtttgtttttttgagaccacaagaaagtaagcaagcgcgattgaaaagatgcttagccaaaatgttccgtatcctatttcagtcatataatcagaaagcatagagtattgcggcatcatatcaaacaagtagtcaatgacatcgttatgcagtgtccagactgcagcaattgcaagatgccaaaatgaaaaacgaaaatacggactgtataatacgccttgaactgccattgcaaaatgcgaagcaattagcatgtagccctcccacggcaagtcaccagttactgcaagcacaagaaaattcatagccaccgcccataggccatactttacgagggtaactagcgcaagcgcctcaaagaacggagcattccgtttcatgagaaaggcaagcagcacaaacagaaagaaaaacgttgctgtcggactgtccggaacaaaaatcaggaaacgtgccggtgtctccaaaagctgcggcaagtaccaatagtagccgtaaaccgttcccagaaaattaatggctaagacaagaataagcatcggccgctgccctaatacatattgaaaccatttcacatcgaatcaactctcagtctgtaaaaataatatgtccaaataaaaaagctgacgccgggtcagcttttgataataaaagtatatccttccatttgacaattcacaatacgttattttgcggttgtttcagaaataaattttgcaagttcttcgagctgcttatcatttcctttgaacacacccgccggcattttgcctttcccttctacagcgatttttttgatttcatccggtttcagcccgctgtcaaccaatgaaggcccggccgctcctccctgaaggttatccccatggcaagaaatacagccctgttccttaaaaaccttatatccttctgcattggtgtcaatgtcggcttcttttgtaattttcccctgttcttctgccttggcccagtcatgagtagcaactgactgccacgtcaaaaatacagcagcggaaatggccagaagcatcataccgacagcgaccggacgcttccacggccttctttctgtccctctgtctaggaatggagccaaaagcagggccccaaaagcgagacctggcataatcatggcgccgaccactgtaaagcttccggcggcgtattcatacttcaacagctggtataagaaaagaaaataccaatccggcagcggaatatacccagtatcagtcgggtccgccatccgctccaaaggcggctgatgcacaatcgtcaaaacgagaaaaccgatgagaaagacagctccaaccatccattcctttaacaagaaatttggccagaaagcctctgttttacccggatactccgaataatccttcggtatattcggctttttttcagccggtatccttgagtcgcctacaaatttcatccctttgccccggtgcatgtcatcccctcccttttattcgcagatcaagagtttaaagcggtcctgaaatcccctgcttccggatcataataaaatgtgcagccatcagcccgaacaatgcggcaggaagaaaaaatacatggatcgcaaaaaacctagtcagcgtttgggcgcctacaatatccggatgccctgcaaggagcgttttaacttgcgttccgatcaaaggcgtagcttcggcgatctgcagcccgacttttgttgcaaacagagccttcatatcccaaggaagcaagtagcctgtaaagccaagaccgagcataacaaaaaagatcagcacaccgacaatccagttcagctcgcgcggttttttatacgcgccttggaaaaagaccctcagcgtatgtaaaaacatcatcacaatgaccaggctcgcaccccagtggtgcatccccctgacaatctggccgaatgccacttcattttgcaaataatataccgattcccaggcatttttgatatcaggcacataatacatcgttaaaaacattccagataatacttggataacggttacaaaaaacgtcagtcccccaaagcaatacacaaacgcagagaaatgatgggcgggattcacatgttccggtacttcgtgatcggcaatatccctccacatcggtgtaatatcaagccgctcgtctacccagtcataaattttgttcagcatgtcacccttcccccttaggctttgcttttccaagatacaggaagccgtcttttacttcttgctcataatgatcaagaggcgcaagcggcggcgtgccagggacattggtgccgtccttttcatagagtccgtaatggcatggacaaaagaatttattcgggtttttaggatcactattccagttcaccgtacaccctaaatgtttacaaattggcgaaagtgctacaatttcatccccgtttttgaagacccaggctgatcttgactcttctgactcataccaggcatcgacttgattaattttaaaatcaaagcgctgcggctcttttgtcaactcatcaacgctgacaacctgaaccatatcctgcttccctgtcgattttaataccgggtcgagtgcgaagcgaaccataggcatgagcatactagccgccataaaacctcctacacctgtgagcgtgtaattcaaaaattgacgtctggatatatcatgttttccgcccatctcttctcccccctctaggtcacccctgcaaactgactaaaatagaaaatattgcaataactctagacaccctcataatatatgaatctctcagcaaggtcaatatagccaaaatattgtttataaggaaatgtaagtgtttttatgaagtgctccataactgtaacaaaacgttcaaaatttcagcagtgcgttcatccaatatttttcttattaaagagtcatttaaatgctctaatggaacagacggtgtaacaatgattttgcctaacgcatcctcagctctccaactttcgtcagatgtgagcaggacaacatgcggaaattccgttatcagctcttcccgcaaatccttaagcccttgaacggttatttcatttctatcaacatatgtataaggcggaagtaaatatacccgtccctttaactgcctttcaagttcttctgagagaagctgcgtaaactcgcctttctccgccgccattttaaaatggttattaacccttatgttaattaatggtatgacagcggtatcaatgtaatccttagcttgtaaatagtccttggcatcagtgattctccacctcatcgttctccccctttacggcaacaagccttgcaattcactgcaaggctggtcatattatgtgagctgatttaattggcgcgataattgttcaaatgcctctttatcatgacgatctaacgcctcgtcaatgtcttttaataatttttctctttggaatgtggaaatagcgtgctctaaaatctgttccgccaatccctgatcttttttattctcaaaaaggtttttcggaatatgcgggttggactccagcaccgccgcatattcaggtgagctgtaagccgaacggaaattaagctggataaacaaatcctgctgtttatttaatctaatatcatgaaaagatttttccgcgtcggtagtcatgacattctctttatagaaccggaacggaacttcttcaacacaatgtgttgacattataatgcctctcgggcaaaattcagcctgctccacaaaatgaaccttctccatgagagaatcatggctcattaagtagttcaagatccaaacgcactctcggcgctttaactgataatggtttaaaaaccaacggataaaatcttttttctcattgacagaaacaggggtctgcatgtaattccctcctctatcgttcgtataatctatatacttatatgttccacatgaatggttaatattcctgcttatctagaaaattcatcctcgattcgcaaaatcgtttcttcaagctcttcattggctccgtccatttcaagaacctttttcaaaagcggcagcgcttctttttgaagaccttcttctaataggaagcttgcgtattcatataagaaatctctatcctcccggtaatgaagataggcagcctcaaaggattgttttgcttcctcgtattgctctaattcagtatatgcgcttgcaagataccaattgtatttaggatcttcttcaccgtagcttcgaacctcttgaataagatcaatgatctgatcataatcctcttctttgtgatacacggcaagaagtgtatgaagcgcctcgacaaagcccggatcaagcgcaagcgcctcctgaagcagcttcttcccctcttctgacttcccgattttcaaggccattttggcggcataaaggaaaagttctttgttatattcatcatatctgatcccctcttttgccgtttttaatgcctcttcatacattccttcagcttcatagcttttcgagagcggcatataaagtgaagtataagatggatcaagctcctttaaatcagacagctgcttaatagctgttttcacaagccccgcctgtaaggctgtaaaaccatagccgaaaatcgtattaggatcaggattctcatcgacagctttctcataccatggaatggcatcctcaaattcacctgaggcacttaacgattctgccagtctttgatggacattaacgcccccgatctcactctgctcctcagccgttgttttaaaatattgaaccgcttttgcataggctccctgagcaaagtaaagttctcccagtgcaaaatcaataacaggttcattgtccagaatggactttgcctggaaaagcttttgttcactgacttcgaataacccctgcatctgataaagatccgccataagcagcaaactttccggatatgatggatctgtttccggaatagtctccagcacagcgagggctttttcttcttcgtcaatatctattaaaagttcagcgtagaaattcgtcagttctgtttcatttggatataaatcatgtagatcactaatcagtgaaatggctttttctacatcgccccactcgtaataaagctgggctgcaatggctttatcttcatcatgcagctgtttttcagccttcgagagcgtgttgaggcctttttctgtttcacctgcttcaactaattttatggcttcttgaatcaatgtattcaaatcggaccggtcctttcttttcctatacaacatcaaccatacaaaaaagctttatttgttcgggttaatcttatcataattcagacgaatgcccccggcaaataagatgcttctgtacggaagggaattattgagtcttattagtttaccaaaagatcttgagatagaaaatgaaaaaaggaagatcgccctctgtacagtaaagcagctctttgacctgccggcttgtaagtaaagcacatcccccttttcgtttttctatcccctctataagacaagctatgttttttcgcctcgaattatgatctgcataaaaaatcctgaagtaaaacttcaggattttttcgaaagcttatttaaatgctcgaagaaggttggataagaaacgtgaatggcatccgtgtgctcgatttcaatcggctcctccgttatacaggaagcaataccaagcatcattccgattcgatgatctccgtggctggacactgccgcgccgcctttcaacgtttgtttgccataaaccttcattccatctgctgtcggttcaatttcagcacccagcttgcgaagctcagaaacaacagtatcaatacggtttgtttctttcacttttagctctgccgcgtccttgataacggtagttccttcagcctgagtcgcaagaagcgcgatgatagggatctcatcaattaaacgcggaatgatatctcctccgatttcaactgcctttagagatgacgtttctataatcaaatctccataaggctctgcaccgctatcagcagatggtttgatttcaagttttgcccccatgttttgaaggacatcaataatacctgtccgagtcggatttaaacctacgtttttcaatacaattctgctgtttggaaccatcgcgccagcagcaaggaaaaacgcggctgaagaaatgtctccaggaacaaaaatatcagcagctgtcagtttctggccaccagcaatggaaacactcgtttgatcttcagaaagcttaacgccaaaagcagaaagcatccgctcagtgtggtcccgagatttatggggctctgttacagttgttgtgccctcagcctgtaatccggccagcaaaacagcagatttaatttgcgcgcttgcaacaggtgatacataatcaattccttttaatgaagcgccgctcactgacagcggtgtaaactctccgccggctctgccgtcgattttagcccccatttttttcaaaggctcagtcacacgcttcattgggcgcttcgcaatgctctcatctccggctaccgcgctgtaaaaaggacggcccgccaatattccgagcatcaggcgaatggttgtacctgaatttccgacatctaaaaggctttctggctctttcagggcatcgattccttttccgtgaatcacgacatcgctgctgctttgctcaatgtgaacacccatttttctaaagcaatcgatcgtgctcagacaatctgctcccggcagaaagtttttaactgttgttgtgcctgccgctagcgcgccaaacataacagagcggtgagaaatggatttatcaccgggaatatgtatttctccatgtaaggtctgcaccttttctcgtttcattttttccacctcaatcagcataaaaagtttcatattccgcccgggcttcaatgcattgttctgcccttttgcggtcgtcatcagactgaaaactgatccttaaaatcccgttaatatcctctcgtgtttcgataatgcggatattcgtgatactgatgcgctccgcagctaagatcgctgttatctcggatattacacccggatgatcgggtacatccacatataaatcataaaatgcaggtatcgctcccttctgccgaagcggcagcccgtcgcgataatccttggcggttttaaaataacgaaatagattttccgcatcttcttgttctacatatgtacggatcttgtcaatttcacgaatccactcatcaaaacggtctaagattttatctttattatgtaataaaatatcccgccacattgccgggctgcttgatgcaatccttgtaatatctctgaatccgccggcagcaaaacgcttaacaagcggatacaggttttccgaatgatgggtttggtgaacaagactagctgctacaatatgcggaaaatgactgattacacttgtaacgccatcatgctcctccggcgacatttccacaaaatgggcattcgtacccttcagcagattttttaactgttccacagcttgtttgtctgttttctggcctggggttaaaatataaaatgcattttcaaacaggaactccttcgcagcggccactcctgatttatgtgaacccgccatcggatgccctccgacaaattgatagcggctaggcagcacttgatcagcgtaatcaaccactttttgctttgtgcttcctacatccgtaatcaaaagctcatgttcaattcctgaatgagccagcgcttcaagcataaccagtgtttgttcaacaggtgtcgcaatgattactgtagctgcctctttcgcaccgctaataaacgaatcagcacgatcgtctatcacgcctaattttaatgccgctaccgcctgttcatcagagatatcgattccgataatccgtttgccgggatgattttttttgatggctagggctatcgaaccgcctatcaatccgagaccggcgagcaatattgtatctttcatttgattcatacgtcatcacctggtttatagactaaagaggtgatattcgatcacctcttataaaatttcagctaaaatggcaagtatttcttcattttgctcttttgttccgatcgtaatccggagtgatgtcgggaaacctaatgcatttcctgaccggacgatatagcctttttccagcagagcctgaaacagttcatcagcaggacgtttaaagtcaattaacacaaaatttgtctgtgaagggtagcactttaaaccatgagttttcgcaaaatcataatactgctgaaggcctgcattattttgctcgacacaggaagcaataaacacttgatcatcaagtgcggcaatcgccgcagcctggcccagacggctcgtattaaacggctctctcgccggctcaatctggcgaatcaggttctcgtcagcaattccgtatccgactctgagcgctgccagaccgtatgcctttgaaaatgtgcgcaaaatcatcaaattggaatacttgcttaagagcggcacggtttccgggtaatcctctgctgttacatattcataatatgcttcgtcaagaacaacaaggacacgtgaaggaacgcgctccagaaatgcgagtaattctccttcagatgtataagtgccagtcggattattcgggctgcatatccaaacgacttgtgtctgttcgtcgatggcttctaacatggcgtctaaatcatgtgagccgtcgggacgaagtgcaatttcacgcacttcagcaccttcaataaccgcattatgtttatattgcggaaaagtcggggcagcagtgatcgtattggttttattgtttagaaatgcccggcagatgatctgaatgatttcatcagaaccgttgccgaaaataagtgatgtttcgctgacattgaggtgcttactgagccttgtccgcaaagcggcgctatacccgtccgggtaaagggctagctgttgaatctcatgatgaagcgcctcttttgcagcctctgaacagccgtaaggattctcgtttgaagcaagcttcacaactttatccaagccatattctgatttcactgcttcaatcggctttccaggctgataaggcttcagctgttttaaatgttctttgatacgcaaatcagtcacctcattttaaactgtacaagccgctaaacgccattgcataatcctcaaactcctgcagcgcctgatttctcgtttcagcgctgatgagccggtcctttaattcttctatttttctgacgagcgcacttcccactacgacaccgtcactaatttcattcatctttatgacctgttcacggtttgatataccgaaccctacagcgaccggaacagtgctgagattcttcactgtccgaatgaacgggtacacggatgaattgaactcattgcggacaccggtcacacccagagaagacacacagtagacgaagccctcggcttgttcaataatggttttcaaacggctttcgcttgtcggcgcaaccaaagaaatatacgtcacctcatggcttttacattcctcttgaaggctgttgctttcttctagtggcagatccggaacaagcagaccgtcaatatgattttcccgcagtaaagcgaaaaagtattctttgttcaattgtaacacaggattataatacgtaaagaggataatcggaatattcactccgttttttttcatttctccgcctaattcgattgcctttacgatattcattccttgatcaagtgcccgctttgaagcccgctggatcaccggaccgtctgcaagcgggtcagagtatgcaacaccaagctccaatgctgtggcgcctgctttttggagtgacttcgccagttcaatcgaaacctcaggaactggatcgcccaccgtaataaacgggataaacaatttttctgatggttgaagatcaaatttaaacatgggctttcacctcttcttccaatacattcattaatgtgttgacatccttgtctccccggcctgataaacagacgagaatgagttgaccgcgatccattcctttggcgagtttgaatgctttcgctaacgcatgggcagattcgattgccggcaaaatcccctctttttctgacaaaagctttaatgcatccaccgcttcttcatcagtgatactgtcataagtgacacggccgcttttatgcaagtatgcatgctccggaccgattccaggatagtcgagaccggctgaaatagagtagggctcaataatttgcccgaactcatcctgaatgagataagtcaatgaaccatgaataacccctacggttcctttcgaaatagtggcggcatgaagaggcgtatcaattccttttcctgctgcttcagcgccgatcagttcaacatcttcatttaaaaatgcctgaaacatacccatcgcattgcttcctccgcctacacatgccactactttatcaggcagagtgccttcaatacgtttcaactgatccttcgcttcctctccgatcattttttgaaattcacggaccacttgcggataaggatgcgggccgacaactgatccaatcatataaaagtgatcctcacaatgctgaacccagtaccggatcgcctcatttgtggcatccttcaatgttccgtttccgcttgttacaggcactacctccgctccaagaagcttcatgcggaaaacgttcagagactggcgggcaacatcctcttcacccataaacacagtacaggaaaagccgaatttggctgcaactgttgcagcggcaacaccatgctggccggcaccggtttcagcaatgattttcgttttgcccatttttttagcaagcagcgcttgacctagcgcattattgattttatgagaacctgtatggtttaaatcttctcgtttcaaatagattttcgcgccgcctaagtattcagtgactcgatcagcgtatgttaatgcagtcggccgtccggaatagtcctttaacagcttataatactcttcacgaaaagcggggtcatccttgatttgtttaaatgctgtttctatttcatctaacggctgcatgagtgtttccggaacaaactttcctccaaaatcaccgtatctgcctatttcattcggatatggatacatatcggttcatcctttcttctaaaagcctcatcagattctgatctttttgtccgtttttttcaattccgctggcaaggtcaattccttctggctgccatttcaataggctggtgatgctatccggattcacgccgccagcgataaagcagcgtttaccaatagccgcctgctgatattccggcacacattcccaagaaaatgcaacaccagttccgcctctagacccttttacagatgaatcaatcacaaagccgtcaacattatctttaaagcgggctatttcttgagttgtgttaccttgatggtgaagcgccttccatatttcacagcctgtcagcttgcgaagagcagcagcatccgccggtttttcatcaccgtgaagctgaatgacgtcgagcttcaagctcttggcaatacgtgacatcgtctctattgattcattaacaaaaacacctgcaacctgtttttcgacacgagcttggttcagccattttttcacatcttgcggagatacttttcgtttgctttcagcaaaaataaatcctaggtaatcagcctgtgattccgccgcaagctgcaaatcctttagtgaccgaataccgcaatattttaatgccggtttcttcacaacctcactccccaaacaaagcatggattgctttacgctgagaagtttgtctcatcaatgattcaccaataagtacagctcgcgccccatgttcattgacaaatgttaaatgttctaaagaaccgattccgctttcgctgacaagcaaggattctttcggaacgagagatgcgatttgttctgtctgctttacagatgtttcaaacgtttttaggtttcgattatttacgccgagaatgtcgggtgtgaacactttcaatatttgttctagcgttgatgcatcatgaacctccactaacacgtccatccccttttcacctgcttcaagatataattcatgaaggtgtaagggatcaagcacctcgccgattaacaatatggcatccgctccgattcttcttgattcctctacttgaagagaatcaataataaaatcttttctaagtacaggaatcgaaacagcacgctttacgtctgataaatagctgttttccccttgaaaaaacggggtgtctgttaaaacggaaatcgcatctgccttcgcagcctcatagtcttttgcaatctgcacaggcacaaaattctctttaataagcccttttgacggcgatgctttcttcacttcggcaatcaacccgataaaccgattcgggcttgccagcgcctccttaaatgaacgtttctcgaaaggctgctctaccggcaaaaccagtgttttcacttcttctttcttttgtttgatgattttttcaagcatagatctcttcctctttctgctttagtcgttcaagctgcgcggcagcgcctccgcttgtaatcgtctctaacgccagctccgttccttccttcagtgaggcggtaatccccgccgtgtaaatcgcagctcccgcattaaaagccgtaatagataaagcggaactgctgcttttattttcaaaaatattctgaatgagataggcgctctctttcggtgactgcacctgtaaatcttcaagtctgccatttgtgaaaccgaaatcttcgggtgaaacggtatattcccggcgctctccgtcctttaattcaatcacgtcggtcggtgctgtaattgaaagctcatctaaaccgtcacggcttgatacaaacatgacgtgcttcggctgaaacgtctccagtgcgcttgccatcagtccagctttttcaacagaatagaccccaatcacctgacgcttcgcctgtaaaggattgctgagcggcccaagcagattaaataccgttctgaaacctagctcttttctagtacctgctacatgtttcatagacgaatggtaaagcggcgcaaaaagaaatcccatgttgtttgtttcaatgctgcttttgaccttctcgggagtggtttgaatagaaacctctagctcctctaaaacatcagcgcttccgcttttagaagagacagagcgattgccatgcttagcgattttcgcgccagctgccgaggcaacaattgccgaggcagttgagatattaaaagtggaaataccgtctccccctgttccgcatgtatcaacaatatcaggaagtccatcgactgtaagagcgtgtgcccgcattgccttcacaaaacccgcaagctcttctggcgtctccccccgatgagcaagaatagacaatataccacccatttccgaaggagtcatttccgctgccatcatcatattcatcaacgtttcagcctcaccggcagtaaggttttttccgtcaacgcacaattgaagaaatttgttcatcagctttatcctccttgctatgaaacatgtcttctgcaatatgaatcgttttcagcagcgcaccggctttattacagctttcttcgtattcggcttctggaacagaatcagcaacaatgccagcacctgcctgtatcgatgcaacgccgttctttacactcatcgtgcgaatcgtaatacaagagtcgatattcccgtcaaacccaatgtaggcaatacaccctccgtatgtctctctcggtgttggctcgagctcttgcaaaagctgcatggcacggattttgggtgcgcctgttaaagtccccgccgggaaagcagacatcagtgcatcgacaggatgaaccccttttttcaatcggcctgtaaccaccgagataatgtgcatgacatgtgaaaaggagacaatttttgtgaactccggcacagaaacagaaccatactctgctactctgccgatatcgtttcgggcaagatcaacgagcatgtaatgctccgccttttctttttcatccttcatcagctcaaccttcagtctctcatcttcagctttgtctgcgccgcgttttctcgtaccggcaatcggatggatttctaagtgcccgtcttgaacgtgtattaaccgttccggagagctgccgactatttctctgtctagcagtttcatataatacatatacggcgaaggattgacgatcctaagcactcggtataactcaaaagcatctgcttttatcggcacctcaaatttttgtgataaaacaccctggaagatatctcctgcttttatatagcttttgattttttctacatcagccataaaagccgatttttcataattagaagataccgtctcaaagctgggtgtcttgtatgaatcagcagagagaaacagctcttttatttttttttggtccatcattttttcgatgagattttggagctccaaatgattttgatggaatacatccattttttcgttttctgtttcctctccagtgagccttgcatattggataaagtggacgtttttggtttcatgatcatacgcaattaatgtccggcaaacaaacagcatgcacttttccatgtctgtttcttttgtatgcgaaggaacagaaggctcaatcagcgggatcatatcatagcttaagtacccgacagctccgccgacaaaaggaatgccaagctgaggtgttttgattttgtatgtggtattcatccagttcagcacttcttttagttcatttcctgtgtaaagagatttgctgtcctgatcagcggccgaaaaacggccctgctcttctttaattgtgagaaatggatgcaggccgataaatgaatatctggaccaagtggatgtatcgtcctggctttcaagaagatacgtaatctccctgtcaagcttctctatcatttgaatgggtgtcagtgtatcgactgtgaaggtctccacaatcggtatcgtgtggtgggacaagctgtcctctaaaaatgcggaaatgtttgattggaaattcattactctcactccttatggcaaggagaatgagaagatggcatgagaggataaaatactatataacaaataaacccaaaagaaagacttcttttgggtagaataaacataatgtctcagctcaactaaactcattctctgctaccctattctctaactcaactcattctaattgctttatacacactcttgtgtatttctaagctgttcttatcgtattacaattcagtattttttgtcaatgataaatcgggcctcaatacgacggctttttctaaatatacatgtctgatctgatcctgagggacatctgtctggaccgtcatcatgactcttatgcactttttcagaccgcctgttacgtccatttcctgcatacatgttaccggtacatactgccatcctgaaagctcgcgaacagcttttgccgggaaaacagcgtgcaaatcaggtgtagccgacagaagcatttgaacaacatcttccggttttgtatgattttcttctatgattttctctaacagctgtttagttttttgtaaaatttcttcttcagtatcccgttcaactgtagttgctccgcgaattccgcgaatcatcatgatgtctcctccaatcgccatttgttcagccagctctcaagttcatttctggaaaatgtatgatcagcaactttccctaattcgttgagcacaataaactgaatcttcccgccacgggttttcttatcattcatcatacggtccaagagaaccgaagtttccgtctcttttctgatttgacttggataacccaggctttttagccagctgaccaaacgttttctgtccatttcacagcctacagtcttttcgcttatatataaagcaaactgcattccgagggctacggcatcaccgtgagtgatctgcccgtatccatattccgcctcaacggcatgaccgagcgtatgcccgaagtttaagtaagctcttatcccctcttctttttcatcctgctgaacgacagacgctttaattgaaatgcctttaaaaatcatgtcattcagctgatcattagtgatatcacgcagtgagtggatattcagcaactcctccagaaacgctctgtcatagataaaagcgtgtttaatcacttctgccattccggacctaagctctttttcaggcagagaacgcaggaaatctgtatcatagagcacggctttcggctgataaaacgcaccgattagattttttccaagcggatggttcacggctacttttcctccgactgcgctgtcatgcgccaagagcgtcgtaggcatttggatgaaatcaatgccgcgcataaaagtggcagccacaaaaccggcaagatcccctacaacaccgccaccgaatgcgatgatgcatgaggagcgatccaaatgaaaacgaatcgcttcactctgcaattttgtgtacatgtccatggattttgcctgctctccactcggtaccgtcacttttttcacaggccatttatcttgcagcaaatggagcatttcatcaccatacaggcggtccacttcttcatccgtgacaagcataatccttgttaaaggcctgtttaaagaggttaatagttcgcaagccttttttctgataccttgtccgataaaaacaggatatgacgaggaagcagtttgaacatgcagtgtcttcattaaaattccctcgacagttttctcatattctccacattttctctaatgcggtcaatttgatctaatccgaattgttcaacgactgcgttcgcaatttcccaagcgacagccgcttcagcgactacacttgccgcaggaacagcacagctgtctgaacgttcaatgctggcagaaaacggttctttcgtttcaatatcgacacttttcagcggtttatacaaagtcggaatcggcttcatgactccgcggacaacgattggcatccctgtcgtcatgccgccttccagtccgccaagtctgttagtagcacgggtgtatcctttttcctcgtcccaaatgatctcgtcatggacttcgcttccatttcggcctgccgcctcaaatccgatcccgaattccacacctttaaatgcattaattgacagtacagcggcagcaagcttgctatccagtttgcggtcataatggacatagctgcccacgcctaccggcattccctcgacaatgacttctactattccgccgatggaatctccgtttgcctttgcttcatcaatggcagccatcatttttttgcctgcctcttcatcgtagcatctgacaggagactcttccgttacgcgctgcaggtcttcaattgacgtatattctgttttttcagctttaacagcgccaatttgcaacacgtggcccgccaccttaatgccaagctcagaaagaatctttttagctacagcccctgccgccactctgacagttgtttcccttgctgaagaccgctcaagcacatttctcatatcacgatgattatatttaattgcaccgtttaagtcagcgtgcccaggtctaggtctggaaatctggcgcttcatttccttttcttcatcttctgtaattggagcggcgcccatgatttttgtccaatgcttccaatcgttattttcaactacgagagcaattggtgaaccgagtgtacgtgcatggcgcaccccgctcataattttggcctggtctttttcgatctgcatgcggcgaccgcggccgtgtcctttttggcgtctggcaagctcaaaattgatatcttcctccgttatgtaaagcccggcaggtacaccctcaataatggttgtcagttgggggccgtgtgattctccggctgttaaatatctcatgacttcttctcccttcatcacattaacgcttttaagtaagactactataacatatttttcagcaaaaagtcagtctatcttttttgataaaagaatgtatcggctgggactaggccaaatttctcgggattgaagatttgctcggtgctgccgacaaaaagaactccattcttcttcaagctatgtgccatttttaaatacagctcttccttcgcgctttctgtaaaataaataaatacattgcggcacacgattaagtcaaagtcttgttcataacgatccgccagcaaattgtgctttttgaatgtaatattctttttgatttccgttttcacttcataacttctatttgcgttttgcgtaaaataacgatctttcacagatagcggcacttcctgtaaagaccgctcctgataaacgccttttttggctttttccaaagctttttcatcaatatccgtcgccaaaatctgatagcccggaagacctttttgctggtccaaaagcatggcaagcgtgtatggctcctcacccgttgagcaggcggcactccaaatctttaaaggcctagaggtcttgattaacggcagaattgcagtctcaagaacttcccatcttttataattacgataaaattctgaaacattgatcgtcattctgtccaatgtttcatttaagagagcttgatccttttccaatgccgccgcaaagtccttaaagctttggaacccctttttctcataaagtgacgttagccttctcttcatttgtgcttctttatatagtgtcaaatcgactccggttaattgtttccattttgttgtaaatacgctgtatgtatccatctctactctcccagtctcgctgtctttttgtcctagtatagcttgttttatcaggaaattgtattgtttcaataaaaaaatcagcttttcagctgattttagatcgttgggaaaggcagaggtctgatgcacactgccaatcaaccctttattcactttaatgtaaacctttacaaaacagatcaaaaaccggcggcgttatatgttgccggctctgttgcttattttcacaatgattaatagatccagcctgccataagctgctgatatgatactaattcttcattcttaaagaaaatgttaatctcgcgttctgcactttcgagagaatcagagccgtggatgatgttttttccgacaaacatgccataatccccacgaatcgtaccaggtaaagcttctttagggtttgttttcccgatcagctgtctcgtcacttcaatgacattttcgccttcccacaccattgcgaatacaggtcctgaagtaataaactcaacgagctctccgaagaaaggcttaccttgatgttcggcgtagtgtttctcagccatttgttcagtcactctcattaacttggcgccagctaattgtaagcccttacgttcgaatctagataaaatgtccccaatgagctgacgttggacaccgtctggtttcaccatgataaaagtcttttccatcatattctccaccccatcattatgtatgtataggctttcacactgcacaccgaaatcgtaacatctttctgataattaatcaatccggggcggagaaatttcttaatatctacaaaaattaaaattttcttttaccgatatattttgcgatggctgcaagagacgagcgtgcgcgccctcgaggaagcgtgtttaatttctgaaaagctttctgcagatacatttcgcttactgccatagatgcttcaattgcatctgtttttttgatttcttcaatgattggttcaagctgttcctgcgttgtctcactgttaatcaatttaagctggttttttaatgcaggatttttcagggcatacagcactggcaatgtgacgtttccttgaagcaaatctcctcctacgggtttacccagctcttcctcagttgaagtaaaatcaagaatatcatcaataatctgataagacatgccgacgtaatacccaaaccagtacaatgccttatgaatcttctcatcagctccagacgcaatggcaccaagctggcagctgaccgcgatcaagagagctgtttttcttttgatacggcggagatacgttctgagattttgttccatgttgtatttgtctttgatctgctcaatttcccctagacaaacttcaacgatcgtctgtgacaaaatcctatgggctttcggttcgttaattctcgtcatcatttcaagagatcccgcaagcatataatcgcctgtgtacatcgcaatacgattgtcccactttgctttgattgtcggttttcctcggcgaagctctgcatcatcaatgacatcatcatgaaccaaagatgccatgtgaatcatttccagagtgacggcgacatatttaatcttattaatatcgtaatcgccaaacatgccagaaagcagcacgaaaacaggccgaatacgtttccctccggcctgcagcaggtgaagacctgcctcgcttaaaagcgggtaatcggaacgtacggtttgttcaagttctctttcgattacatcaatatcgtcatttaaaaaagagtaggccattttaaatttcatatcattcacccaaacatctgtgttttcatttccatccgatatgcgtggcagcgactccgccagtaaacgaatgatatttaacatttttcaggcccgcctcttcaaacaggcctgccagttccttcattccagggaaatctctggctgattcttgaagccaagaatattctttatagctcttcgcaaacagtttcccgaaaaacggcataatatacttaaagtacataaagtaagcctgtctgaatccgaacatttccggctgggacgtttccagacataccacctgcccacccggcttcactacacgtctcatctctttcagtacagtcaagtaatcagggacattgcggagtccgaagccaatggtgacataatcaaatgtatcatcatcaaaaggaagctccatcgcatttccgtgcagcagttcaatttggctgaatccgccgtcttttactttctgctcgccgacactcagcatattttcactgaaatccaagcccttgatctcgccgcttttgccggccgcttttgcaagagcgatcgtccagtcagccgttccgcagcagacatcaagtgctgttgcgccttcttttacattcatgatgcgcatcgttttgtcgcgccattttttatgctgctgaaaactgatgacagagttcatttggtcatagtttttatatattttttcaaatactccgtgtacgcgctgttcttttgagtcctgcataatggtttacccttcttccactttctgatgataggtttgatcttggctgattgtcttcagacggtttattaaaatgttctgaataggtgaatttagaggcagaagtgactcaatgctgtttttcgcttttttaaaacaatcttctaatatctcttcttttgtttttcccagctgtataaaactcccgatcacatccagaaatgcatcatttccgttcataagccgcttaaatacaaaaaaatcactcgacagctttttccagcgcggaaggttgaagtgttccgccacacgatggaataaagctgattcaacgatgccgacactttcgaaaaaatcgttttcgtccttgaaagaacggtcatacagacgaattttatgttcgttgatttctttaatggctgtagcaagcgtccgaatcatgtagatatccttcatttcagatagtaaagagtagtacagcccgctgaaataatcgcccgcgagaacagtcaattggcggtttttgttttcgtctcgttttatgactctagctgtcgtcacttcatcatgggtatcaagggcgctttgtacaagcatcgctgttacaatataattttctctgtcgttgttttttatgtcagcttcttcaaataaagcatgaaaaagaagaagcttatcctcatcaattttcggcgcggaaatatgcttcgctaaataaggatgagacagcttttgttttaatttcttgttcagattggctaaagttccgtagatgtcttgcaaaaatatcacccttgtccccaaattcacatttatttcttaatctatgtatgagttttatcttttcattcgcttacgcaggtatcattatagcataaaaaaaagaaattggctgtatcctcccgctgtttgcgagcatttgcttttaacagcggggacagccagcttattttttttcgcttttcatttctccgtacgcggtttgaatcagtgcctctcctctgactttaatggcagaagtatgctctgtaaactgagcgatgatcacttctcccttgtcgagtttttcggaatggtgaaactttgtgtctgttcctcttgtcaggccgatcacattcactccgtcctcaacggctttaatgacgacaaaatcacttgaatgcttttggttcatttatagcaccctctatctttattagtcctggcgtttaatatgttccaatacttctgcacgggcagcggcatcatctttaaaaacgcctctgactgctgaagtcacagttttcgcacccggttttcttacaccgcgcatcgtcatgcacatgtgttccgcttcaaccactaccattacgccatgcggatcaagcgtttctacgatgctttctgcaattgtagaagtgatgcgttcctgaagctgcgggcgctttgcaacggcttcaacggcacgtgccagtttgctgagtcctgtgacctttccgcctcgcgggatatatgcaacatgtgcttttccataaaagggaacaaggtgatgctcacacatagaatgaaacgcgatatcttttacaagaacaagctcctcatggttttcaccgaagatagtctggaaatgttcttttggatcttcattcaagccggagaatacttcggcatacatctttgcgactcttttcggagtatcaagaagcccttctctattcgggtcttctccgatcgcttctaaaatttgacgaacagcttgttcgatttgctctttattaacttctttcatgttctatgtcctccaccaatgaatacatttaatttcgattctagcacatatgccccgctaaaagcaaagtgaatgccctgtcaggaagcccatgctcttgaaatatgaaaagccccttagaaaggggcttttctgtgaagaaataaagtgtatgtaagctagatgcatacacgatctatattcacaattattttccggcaactgcgtctttaagcgctttacctggtttgaaagcaggtactttgcttgctggaatttcgatttcttcacctgtttgaggattgcgtcctttacgtgcagaacgttcacgcacctcgaagttaccaaaaccgatcagttggattttatcaccgtttttaagtgcatctaagatcgtatcaaaaacagagtcaactgcttttgtagcgtcttttttagacaattcgcttgcttctgcaaccgcattgataagttctgttttgttcatgcctttcacctcctcccaaaaggatacattcagttcgtttattatcatttcttcacagttcagtctgattctaaacctgtctcagaaaaaaatgagagcaagtaagagaaagacaattaaacggctttttaagaaaaactgcactctgaggaatgtttgtccaacaaagtgaagaatttctgtatgtagagtaacacatataaaaagccatatcaagcattttaaagcgtcaatcccttgctcgtcaaggatttaaggtgatttaccgaacaaatattcctttttttccttttttcatcctattccttgatccttttccattattaagaacaaagaaaaaagacctcccattctataaagaggtctaccggtattacaggatgatggcgattaagccgccagagccttcgtttatgattctttctaatgtttcttttaatttataccgtgcgttttcaggcattaatgacagctttgcctgaatcccttctctcacaattgagctcagcgaccttccgaagatatcggaattccagatggagagcggatcatcctcaaagtcctgcattaaatagcgtacaagctcttcactttgtttttccgttccgataatcggggcgaattcgctttcgacatcgactttgatcatatggatcgacggagcgacagctttcagcctcacaccgaatcgtgagccctgccttataatttccggctcatcgagactcatatcagctaaagcaggcgctgcaatgccgtatcccgtctgtttgaccatttttaaggcatcagacacttgatcatattctgttttcgcatgggcgaagtcttgcatgagctcaagcagatggtctcttcctctgatttcgacgcccacaacttcttttaggatttgatcatatagatgatcaggcgcgtacaaatcaatttctgccaccccttggcccagctcaattccggctaatccggcactttcaatgaattcaaactcgctgaattggccgacaaccctgtctacgtcccggagccgtttaatatccttaaccgtttccttcacggactcctgatagctttcacgcagccaatggttttctttcagcaccattacccagcttgggagattgacattcacttctagcaccggaaactcgtagagggcctctctgagcacactcagcacatctgattcccgcatgctctctacactcattgccaataccgggatatcatatttttcgcttaaatcctggcgcatggcttccgtttccgggtgatacggcctgactgagttgatgaccataataaaaggtttgccaacctctttcagctcttcaatgactctttcttcagcctctatatagtcacttctggcgatatctccaatggtgccgtctgtcgtaatgacaactccgatggtcgagtgttcttgaatgacttttcgagtgccgatttcagcagcctcatgaaatgggatcggttcttcgtaccaaggcgtattgatcatccgcggcccgttttcatcttcgtatcctttagcgccgggcactgtgtaacctacacaatctactaatcttatattcacatcgagtccgtctgacacatgaacagacatcgcctgattcggaacaaatttaggctctgtagtcataatggttttgccggctgcgctctgcggcagttcatcctgcgctcgggcccggtctgcttcgttactgatattcgggagcaccacaagctccataaattttttaatgaacgtggattttcctgtacggacagcacctacgactcctaagtatatatcgcctcctgttcgttcagcgatatccttgaaaatatcgaccttttccaagtgatcccctcccggacttcctatccttttcaattttattaagctctttcaatcaaacacaggacactatatgtgtatgacgttgtcctatttgaatatgacatctttagaaaatttctcatcctcaatctattaaagtataaaaaaacctttctccctatttgtatgcaagggagaaaggttcattcctttttcatatcattttctaaaaaaacaggttcctgtttgtcatttaccgtatattttacagaaaacgcggggacaaagggggtatcctgccaaatcatatcctggatttcagtcccgggtttaaacgtttttttgctttttttgaggcaagaagccagctcagtccggtaatcggcatatatttctccgtctccgtcaatcataagcggcaaggaattccctgagattgggcttgtcactgtaagagagcttccatccccaagcttcttctcatcgagtgtaaataaatcacgagatagcacatccttgtaaggcggatattgatgctcctgacgatacatttggatgcgcaatttcacatcgcgaattttttctgccatctttagatcaattaatttaacagtcggatcgttctctacgtcaacaagcacgtattgatagtctcccccgctttcaaatgccgtacttggaggttcagctatgtatcttggcgctaaccggttaaagtctatcggatatttttgatatagcggtgtcgacatatctttggtttgaataggaagcagccctccatttgccttttgaaattcatcaacagcagattgaacctgctttagctggtcttgataaggaatggcatgcacactgcttttccgttcatttggatataaacatccggataaaaacacgactgccgcaaaaatgattgcgcacttcagtttacccatacagcacttccttttacagctttattcattgacagggccgctaaaaaccacgacaaacacaataattccagatatgagcatacacatgtatgcgaatgatgaaatcgcaatcttcaaaaaacggttttggcacttaaagcggcttaaatagatggaagctacagccagaaacatcagacccatggaccctagagcaaaccacattttcatcaatgccagattcaatgacgtgcgcctccccgatatgtatgatgtaagcgttatattatattttaatatacagcgccggaaaagatcaaccagattttccatccattgatagaacaaaaaaactgaagcaaagagggggaccttcgcttcagtcaacttgactatattcacctgcacgtttaagaaacactctcttggacttcgatgctatagtatgcgacttggcatacagatgcatcctctattgcctaaatcggcaaaatgtttcaggagatcccaagacttgggtgttcttctgtttttcgggctttcgttcaattaagatatgcgtttcatcataccattgacacttttacttcacttgattttcaaacgtatttaccaaatcctccatctcgtgggttttccctcttgccattaaagattcaacagcggtttccactttttgtccgttgaacaggacctgatggagagcttctgtaatcggcattttaacatcatatttcttcgaaagctgataagccgctttcgtcgtgcggacgccttcgactaccattcccatctcttcaagaacatcttcaagcttgtacccttttccgagcaaattgcccgcacgccagtttctggaatgaacacttgtgcacgtcacaatcagatcgcctactcctgtcaatccagagaacgtcaagggatttccgcccattttcgttccgagtctcgcgatttcggcaagtccgcgtgtaatcaaagcagctttggcattgtcgccgtaccctaaaccatctgtaattcctgcagcaagggcaataatattttttaaagcccctccgatttcaactccgataatgtcaggatttgtgtacacccgaaaattgtgattaataaatagatcctgcacctcttctgctgccctcatgctctttgaagatgcagtaacagttgtggggtgccgcagccctacttcttccgcatgactcgggccggaaaggacaacgatatcttttctgacatcactcgggagctcaatttccataatttcagaaatgcgcagaagtgaatctggctcaatacccttgctgacatgaacaaagactgcctttttcgttataaaagggacagcctgtctcagcacttcccgaattgcttttgtcgggaccgcaacgataatgaaatctgcgtctgaaacagcctctttcatatctgttgttcctttaatggatgtagacagcttaacattcggcaaataatctttgttttcatgcaactcattaatttgatgaattaaatctgcacggtgagcccacacacacacttcatttccattatcagttagaactaaagccagtgctgttccccaactccctgctccaagcattgtgacttttttcatgtttgattcacacctttttattttctagctcttgcaaatattttgattggtgtcccctcaaaaccgaacgcgtctctgattcggttttctaaaaaccgttcgtatgaaaaatgcatcaattccggatcgtttacaaacacaacgaagcttggcggctttaccgacacttgagtcgcatagtaaatcttcaaacgagaaccgttatgagtcggtgtcggattcattgccacagcatccatgatgacatcatttaagacgttcgtctgaactcgaagtgaatgattttcacttgctttaataatcgcaggcatcagcgtatggatccgttttttcgttaaggcagacataaataggattggcgcataatccagaaattgaaaatgatcgcgaatattttcttcaaattctttcatcgtgctctcatctttgtcaacagcatcccatttgtttacgacgatgacgacggccttgcccgcttcgtgtgcatagccggcgatgcgcttatcctgttcaataatgccttcttcgccatccagcacaaccgccacgacttctgagcggtcaatcgctttcagcgcccgcagtacactatacttctcagtcgtttcatagacttttcctttttttcgcatacctgcagtatcgacaatgacaaactcctgctggttgtaagtaaatgacgtatcaacagcatctcttgtcgttccagccacgttgctgacaataacgcgttcttcgccgagcatcgcattcacaagtgaggactttccgacatttggacgtccgatcagacagaattgaataacttcttcattgtatttcgtttcaggaatgtttttaaaatgctctgcaacggcatccagtaaatcacccagtccgagtccgtgtgttcccgaaattggatatggctcgccaaagcctagcgaataaaaatcataaatattcgctctcatttctgtgttatccagtttattaaccgctaaaacaacaggcttttttgtgcggtacaaaattttcgccacttcttcatcagcagctgtcacaccttcacggccgttcaccataaaaataatcacgtccgcttcatccatggcgatttcagcctgctggcgaatctgcgctaagaacggctcatcaccgatatcaataccgcccgtatcaatcaaattaaaatcataattcagccattcagccgagctgtatatccgatcccttgtcacgccaggggtatcttctactattgaaattctttctcccgcaatccggttaaagattgtggattttcctacatttggtctcccgacaatggctacgacaggtttacccatagtacccttcctttcaatccagccgctttcatttttacataaattttcaaccggttattaaattcatttcattcacttttatgaaaagaaacccttcagaggaagggcttaactcatttattatatcagtttttactgggatcacaactattcttaaaaatgtttcacgatcaaatacacgtcatctccgattctgtgagctattccatcaaggatcgcctcaagatttttagcgaaaagctccatctccttttggtcattgcaaaaaaagacaggtgctccccctgcaacccggtttggatttgtcgtgattacagacaaaatcactttcgtaagagattcactcatcctatcaccttatcctgattcttgataaattcagtcggcattctaatcgcattttccaaggttggaacattgctaataatttgaacagccgtttcgggatggtgaatttgcgggagaacaaatactgccactctcccatcatttaaatcccgttttgcaattggtgtcaaagatggctctcctgaatcccgataaaccccgagcacattggaaacatcaaataaaatggcctgacgctgccctaaatttgctatcgtcgctgctgaattaaagtttttcggcgttaaaataaagcccatgccatgctttaaaatcagttcctgtttctctggaagcccgatattcatcatataaatattatcaacaaacagtcccggaccgtcaaagcgcggctttatgtactcgatgtctacaatatccttcaacacactgcccgacataaatttcatggccagtaaaaaacaaacgacagccgctatgacagcagcccagatggataaaaacacatacgcagaggttgtcaaaagcgctgtaaagatcacaatataatttctgctttcaaacgcaatggcaatcccctcaatatatgtgctaccccttgagacaagttcatacgaatccatttgcgtcaatgtgttccgctccatgtttcggacatctctaaattgcgtcgctgccaatgttaaaaatgtgatggccgtaaattcctcctgcaaaagcgccggcataataattgcacctaaaccagccgctatcaaccccagtgcgatgtgaatcactttcccatgaacataggtcggatactggcggtaatccgttttcagcatataaagccttgtcgcaattccggcaatgaccccaacaataatcggatagatgtaatcactcatgacattttggtagctcctttgtttgatcttttgcttttctgaccaatctggcttgcgaggtattcgtatttagatatgccaaacagcaatatcatccccgcagaacacgcattcagccattgaaagccgccgacagccatagccccggccaacttctggatcacaaatgaatacaccagttcgccttggcacatccctaggacaaataagacaagctgcttctcaaaattcctatcaacagaagctgttaaaagcactattaatataacagcagcccactcaggttttatgatgaaccaaaccgggtcatataatgcaaaaagataaacaaacgcatacgcggaaacaagcgtcagatagaccatgatgtaacgaaaacgatacattcccaaatacccggcatagacacatccgcaaacgaaaaacatcaaatatgcagcattcagggaaaaatataaagcgatgtcatgtatgcttagaataatattagttaaaataaagacagagacggcaattcgtcttttcgtcttttcaaaaataaatgttgtcagaacccacagaaaccacattgaccaatagtaataaaattgttccattttacttcctccatattcccagtatggagttcaagcacattttttaaacaatcgatctcatattaaggagtatgatcatgggaaaagacagacaagagaaaaaactcaaagcttcaggcagagtcgaatcagaccgcgaccagtccattcactatgacggagcgacaagccttgaacaaaacggaagattcaaaaagcgaaaatcataatacaaaaagcccaaaccacatatggttttgggcttttatcatttatcgcacactatagcttgatgtattgatccctctctctgtgagccaatgatgggtttcacctttgatcacaaggggcgccttttgtaaatcggcaatcgttctggtgcccagcacggtcataatcatctttaattcctcaaggatcagctgaatctcctcaagcagtccttcctcaccgctgtcagtcagggcttttaaaaaatgccctgccattccggtgcaagaggccccaagcgcaatggcctttgccacatcaagtgcatcttgcagaccaccagaagcgatcatggtgcttgcaggaaactcggagcggatttccgccaaacttgcagcggtcgaaatgccccacgagttaaaaaaggagatttgccgctgtcttcggagattttcgattttcgagaaatttgttcccccgtaaccgccaatgtcaacagctgcagcaccagcttcatacagctttcctgctgattctttgctcataccgaatccgacttctttcacaatgactggtacgctgacatgactgcaaatttgttcaatgcgttccagtgcgccgctaaagcttctgtctccttcaggcatcacaatttcctgaatcacattgaggtggatctgcagtgcgtttgccccaatcatctcaacggcttcctttgcctgggcagccgttgcctcgcttcccaggttggcaaaaatcagcccgtttgggttttcctttcgaacaatttcataggaaagacgctctgatggatcttttaatgctgacatttgcgatcccacagcaaggggaattccagcctgagaagccgctcgcgcaagcgatttattaatctcatatgtaagttttccaccgccgccagtcattgcattgataaaaatcggcgaactgcttgaaagttcgccgatttttgtggaaatatctacttgttctaatgcaagatcgggcagactgacgtgaacaaacgtaatatcatcaagacctgtttcccgcttctggccggtggacaaggcatgattgatgtgttgtctttttcgttctgctcgagtcacgtttatcaccaattattttagtttattcagcttatctccgatcagatctccaagctggaagccagtgcttgtttcttccttcgcttgatattgacggtaatcttcctgatcagctttaggcgtttcttcaagttcacgcatgcttaatgaaatgcgctcctcattttcattcacatcaagaaccttcacttttacagtctgtccttcttcaaggacttcatgcggcgtgccgatgtgtttattggaaatttgagaaatatgaacgagaccttcaacacctggaaggatttcaacaaaggcaccgaagcttacaagacgctgtacagttccttcaagcacatcgccaggcttcactttttcgccgatttggctccaaggtccaggcagtgtatctttgattgataaagaaatacgttcgttgtcacggtcaaccgataacactttcacttttacttcttgtccctcttcaacaacgtcagacggtttctctacatgagagtgggaaagctgtgaaatgtgtacaagtccgtcgatgccgccgatatcaacaaatgcgccaaagtcagtcaggcgctgtactttgccatcaagtacacttccaacttcaagagactgaagaagttcttgttttttattcgcttgctcactttcaacaacagcacggtgtgaaaggatcacgcggtttttatcacggtcaagctctacaacgagcagtgacagtgtttttcctttatagtcagtgaagtcttcaacgaaatgtgcttcaacaagtgatgccggaataaaaccgcgaacgccgatatcaacgacaaggccgcctttcacgacatctttcacttcagcttcaaacacttcttttgtttcaaattttttctcaaggtcttcccaagcgcggtctgcatcaacagcacgtttagataaaatcaaagcatcgtcttccacttttgttactttcaggtcaagctcgtcgtctactttaacaacatccgatgctttctctacatgaagacttgataattcactgattggaataataccggattgtttgacattgatgatttctacatctacatgtttgtcttctacctttgtcacaatccctttaactacatctccaacctctggcacttgaacatcaatttgattcatttcctctgtcatttgaataacctccttggtccaaacctacacagcttaattaaaacggtttgaaagctgaacatataacatgcccgcttttagccgaatatgtattaaagaatcatccaaaaaagttttttgaatgatcaataaaaagttttattagtattaacttctaataaaaggacaggtttgtcaagcaataacattctatcttcgttgaaaaattcaaaaaaagtggcatttgccatcctcagcgggacttttgctccacagcctcgaggattttatcagctacctcttgaatggaaagcgatgtcgtgtcgatttcaagagcgtcttctgctttacgcaacggagatacttcgcgctctgaatcaagcttgtctcttcttgcaatttcctcaattaatgtttcgaagttgacatcaaagccttttttcacattttcttcataacgacgtttcgctctctcttcaacagatgccaaaagaaagatttttacttctgcatttggcagcacatgcgtcccgatgtcacgaccatccatgacgacgccgcctttttccccaagctgctgctggcgtttcaccatctcttctctgacacttctgtgcttggccgcaattgaaacttggttgctgacttcatctgttctgatcgcctcagttacatcggtgccgtttacaagcactttttgtccatcttttgttgtaatcagctcaatgtctgtccgctttagcagctcagccagtttttcttcatctgtcagatcaacgttttcctgtaaagccgcgtacgtaatcgcccgatacatcgctcctgtatcaatatatatgtacgattttttctcagccacaattttggcaacggtgcttttccccgcagctgccgggccgtcgattgcaatcgataatttcttttccataattcctctccttgctcttttctcctctatggattgtatcacgaactttatgaaaaagggtgaaaaattgatgaataattaatgtttgaaggtttcaatcctattgttttcctccattttatccaccccttcatattgaatcacttttgatacgtatggttcaatatgctgatagtgaaaaagaaattggacaccaagtaaaatgatggcctgaatgaacaataatttgatcagcagccgttcaaatgttttcattggagcacctccattacaaatagtatggaagtgtttgccgatgtttattccattcgggcctttcttctcttatttaactggcgcctgatgcagtattgaagcaaagcctgctggtcacctgctgcaatttctgaatactctaaagtcatttttcgtttttctgacttggggtcattaaagattcgtctgacaactgcttctgtttctatttgacgtgtgtgctcctcttcaggaagacggatgatcaggcgcaatgattcccccgattgaaaagaaaggccatcagctaaaaccacggcgatgccgcctgcactgatgttataagatagtgtgcggatctcttcctcatttcccggctgaatttgcacatctaataccgcatcagttcttacatattggcggcgctggattcttttcattttttcacggggaggcacttcaagacagatcatttgaagtttgtccttcactttaccttttatacggcttataaagcgataaggaacttcgtcttttcccacaaactctaccgttacttccatatcgttatgtaaaatcacagttcgccctgtaactacatcaacaggatacgcgatcaaaagttcattgttttcgatgctgaccgccttgctttttgcctttttcaattcattttcttctatatattctaaaagtacagtttctccaatctctatcattgacttcactctttcgcattcaatatactcacgtttttattaaagcacgtaatgaaaaaaaggaaaagacatttagtcctttcctcctgttttttataggtctttatatataggttctgcattttttagtttttcaaccttttcttccgatccgtctttggcattgatatacattctgaaagtgtcattttcaattgttccaagcatttcgtaacataacacttcttgacctagttcatttgtaatcaaagcgagccttgtttctctcacttgtacatttttatttaatttagactttgcctctgcttcagtaattgcaggcttaggtatggttctttttctgtgagatgtgaggaagtctcttgctgaaaagccgacaacctcaccgtcatccaaggccactttcatacgaattgcctccgggtacatccggactttattttcaacaggaacatatgaaaatacaccgattttatcatattgggcactttcatcaatttccaaatcatctgtttcaaatccgtttttctttaaaaatgcaagcgctcggttcgatccgtcatttaaactgattttctgatctttcacttccctgttttggatcaagtataccggatgcccgcccttcttcgtaatatccatataaatcactgctttatggtctgggtctttcatgctgatgctatatacatcgcgatttgttttttttccgctctttaccactttaattgaataattgtcatctggggcaaagcgctcagcaatttgttttgcttcctgttcggaaatttgttttcccttcagatggctgaagcctttctcttcttttttcgtactggtgaagctcgggccaagatcagtgccagtggagaatgcaccaacatttttttcgactgttttaaagctgttgataatcgtattatcactttgtttttcgtcagaagccagggccatttctacgtccatccagcgaaggtttttgctcatgacaaggtgctgaacatgacgcaattcattttgtatatcttcggactgctgatatagcttatttagtgatgtatactcgtttttatcaagcggcttttggtccaaatctctgactgacgttttatagctgaaatcgccgatctttgataatagctcttcagttttattaaacggcattaatgtaagcggcagctgactgacactgttatgagcttctgatgtaatcctccacacatcgatcaatgcaggcgacagtgatttttggctgttcatggcaagtgttgttccgattttatcatgaagctgatccatctgataggtaagctcatgaaacgcccgctgatagttattttcagcatgaagaagaactgcgtctttttcctggtgttctttgtatccccagtagcctgtaccgactattgcaataccaagcacggcgattaaaattcctctgatcatttatcacacctctttttatgctttctcatatctgctactcacagaaaatgtgtttaccgattcttttaatctgcggacgcccccaaatccacggacttgtagccgtatccggattaaagtagtaaagtgcttcccctgatgggtcccagccattgatggcatccagcactgcttctcgtgccgtttcattcggctgcatgtaaatttgtccgtcggctactgctgtgaaggcaagcggctcaaaaataacccccgctactgaatttggaaataacgggctgttcaaacggtttaaaatgactgctgcaatagcaacctgcccctcgtacggctcgccccgggcttcgccataaaccgcttgagcaagcagcctgatatcgttgttggaaaatccaccaggcatgttcgctgctaccgcatcctgttttcttgcttttgctggtgtattgttttgctgtttattcgcattcgctttaggctgctgcgttgttttttccgcaggctgtttctgccgtgcttctgcttgttgtcttgccttttgtgttgctgcttttgatggtttcgtctgatactttagcggaatttttccgtaatgcgtgaatgtattccctttattgagctgttccatgacatattcacgatagtattttgatttacatattaaggtttgctttgttttagctcctacaaggccgtcaacctcttttaacccgaattgatcctgaaaatttcgaactgcccagtacgtcccccatccataaaccccgtcaatttttccgttataatatccgttgtattgaagacgcgcctgaagctcgaccacatcatccccggttgcccctctttgaatgacctgattcgaaaaggcagagatcgtttcagtattaataaacgccgttattgtaaaggaaaaaaggatgagacatgccataatcgatcctttggacttcatcttttcaagcctcctactgcaaatttttaagtgtaatcgtattttctgtaacgaggttatttttatacactctttccttgttatccctcagaacataaaaactgcacacaaaaaagccgcacggttgctgtgcggcttctatacttgcatcatattaacggaacgggcttttttcgctttacgcaaaccaaaccaccataaaaataccataaatggaagcatataataaatccaattgctaagcgctgttaggataaaatcatatgatccatgcaaaagggatgggaccactaaagaaagagtaagccactttacacgcgccttatcagcggaaaaacgggcttttccaaggtaaaatcccattataacgccaatcaaggcatggcatgaaacaggcagcagcgccctgacaaacgcatgctccacgccgtggccaattaaataaagaatattttcgagggttgcaaaaccgagtgatacacttgtaccgtacacaatcccgtcataatgctcatcaaagtgggcgtgcgggtaaacactgatcatcagtataaaccattttaatgattcctccaaaaaccccgaagataaaaaagaaacgaaaaagcttccgcctcctacattctctttttcaagtacatactggataaacattatgggaaatacaagaacaaccccgagaaaaaacgaccgtagcaccatatgtacaggttcattatcatactgatcttttaaataaaaataacttaataacgcgatgccgggggcaattcctgcagagatgattgcaaacatcaggcaacctctttcctttatattcctacgtctatcctaccatgttgtttaaaattttacatctgtctgcacttaaaaaaacataaagagcatacgaatgcatcatatgctcctcatctttaatggttttctcttttggcgatttccgctgcgatatgcccccgtgaaacctgccgttttcaataaatatttcatttgcattgtttcccgcagcaataacaccggcaataaagacaccttcaacgttcgtttccatcgtttcttcgttgaaatatggacgccctgtttctttatcaatttcaacaccaattttttcaagaaattgatgatcaggatgatagcctgtcatggcaaatacaaaatcatttttaatggtaatgagttctttctctccggagcgaaacacaacttcatcctcggtgattttttcgacacaagcgccaaattccatacggattgtaccgtttctgacgagagcttcaaattccggcagaatccacggcttaatgcttggagaatactcattgcccctatataaaactgtgacacgcgccccagatttcacgagttcaagggcggcgtccacgcttgaatttttcccgccgatgacaacaacatctttatcaaaatacgggtggccttctttaaaataatgaaatactttcggcaaatcctcaccgggtatattcatatagtttggatgatcataatagcctgtggcgatgatacaatatggcgtcgtgtaggtctcttttgacgtctcaataacgaatgtgtttttttgcgttttcgtcactttatgcaccatttcaaacgcattaacacggatgtttttccgtttaacgacttcccggtaatacgataaagcctggattctgacaggcttcctgttctctgtaataaatgccacatctccgatttcgagcttttcacttgagctgaaaaaggtttgatgcgtcggataattgtaaatactgttaacgacattgcctttttcaatgacgagggcatcaatgccaatttgttttaggtgtatggcagcagatagtccacaaggtcctccgcctataataattgctttttcttgaatcatttctgtcaactcctgcgattggcatttcacttcatattttctatttccgaataaaaaaatctcctattttatcataggagattttttatttttatgcaaatcatcaacttatatccagcctctaaaacgcgaagcttcagccattttgcgaacgccgaccatatatgcagcgagcctcatgtcaattcttcggttgttagccatttcgtaaatattgttaaatgatttgaccatcattttttctaatttttcttctacctcttcttcactccagtagaagccttggttattctgaacccattcaaaataagaaactgttacgccaccggcacttgccagcacgtctggtacaagcagaatgtcccggtctgaaagaatttttgttccttcaagcgttgttggtccattcgctgcttcaacgacaattttagcccggatattatgggcattttcttctgtaatttgattttcaatcgcagcaggaacgagaatatcacaatccagctccagcagctcttggttggtaatggtatcgttgaaaagctttgttacagtaccgaagctgtcgcgtcggtcgagtaaataatcgatatcaaggccttccggatcataaagtccgccatacgcatctgagatgccgacaacttttgcccccgcatcatgcataaattttgccaaatagcttcccgcgtttccgaagccttggacaacgacacgcgcacctttaatatcgatgcctctcttcttagccgcttctttaatacagatggtaacaccttttgctgtcgcagattctctcccgtgagatccgccaagcacaagcggtttgcctgtaataaatccaggcgaattaaattcatcaattcttgaatactcatccatcatccaagccatgatttgtgagtttgtaaatacatccggtgccggcacgtcttttgtcgggccgacaatttggctgattgctctgacataccctctgctcagacgctccagctctctaaacgacatatcccttggatcacaaacaattccgcctttaccaccgccatatggaagatcaattatgccgcattttaaactcatccaaattgaaagcgccttcacctctttttctgttacgttcgggtgaaaacgtatcccgcctttcgttggaccgacagagtcattgtgctgcgcacgatatcctgtgaaaatctttactgaaccgtcgtccatacgaacaggtatttttaccgttaataatctcatcggctcttttaacaattcgtatacctcttcgggatatcccaatttttccagagccttatgtattacggtttgggttgattttaatacatcaagtttgtcctcttctgtatgaccggtgtttcgatcggctgccatttgagttaacctcctagaatcttctgtttctcacatgctccctttcagagaatagtatacaccttcatatgatctgtgcatagaataaacgttatgtttttccatgttttttaacgaaaaaaaactgctgaaatcagcagttttccgttgcattcttatgaaaaatgagtttgtatcgtctctacggcattaccgtccataatgagcttaccatactcttgcaggcgataaatcgttaaagttgtcggattgccgtattcagccagaaccgccacaaccccttcagccgtatgtgaccctagatcttcaaggcttaaaaagtactgcccgtcatagtggtagacagttccccctgtgataccgattcgctgtaagctttctgaaagctgaatgatatcttcaaaggaatggaattgatatatgatgtccgcgctttcatcaagcttgacttgcatttcgatgtaatcatcatcatactcatcgtcttctgaatcggcgtcttggttctttgttacaatcacgaccatcccttgtgcttggagagaatacacttccactgcaatcggtccattcgcttcaaagccgagctctgtatttgcttcattcatcatatctttaaataactggtggactttgaatgagtccttccagaggtcttcttttgtcaatccccggtctgtcaaatcatcgagggttaaaaagattttgatcttattataattcagacgctcaagccgcataacgttccctcctgcctctacttgcacacaaatcatataacacattatatgagatgatgagtcataggttcttaattgttatcagtttacactgagttcactagtaagacaagcacaatgcagtttttattgccatatggatttttgctttttagaagttattctggcccgcaaagagtcacaatgtgtgtttcaggctcagcacctaaacgaagaggcacttttgtcgtgccgtagccgttgctgatcagatatgccgcgtttttaacaatacctgttttccccagttcataaggaccgaattttccaaacctgatctggcctccatgggtatgtccgctgagtatcacatcaataccgtcatcttcattgatttgttcatgaatctccggattatggcaaaccagaatattcagctggctttcatcaagttctttgatggcttcttcataatgatccatctccatcctgatatcatcaacccccgcaatcgcaatcgtatgcccattgtatgaaaacgggactgactcatttctcagagtgatgacgccgtgcgctttaaatatggaatacagcttatgctgcctgacttcataatcattattcccccacacaaacacgatagggaccccgaaatgtacgagccttttgatgttttcctcgattctcgcactgggcaccccgccctcagctaaatcaccgccgattataaccaagtggggggcatggcttcgcgctttttctaaaaggtcttgatcgatgagacgtttgtgaatgtctgaaataaaaaagattgtcagaggcggcttgcccttcatctttgataaaggaaacgtatgtgtcttcaaatgattgccttttgctgttgcatacatttttgccgtcattgccgctgccgcaacagttagtacaccggcaattttcactgatagcttcataaaaaaactctccattctttttagaacttatcaataagacggacaataaaaaaaagacgtttctatcgtttgagaaaacgccccattttatttactttcaaaatatagattaatgtcatatttgtgcttcatcatatgaaaaacagactctctcgccttccatttatcgggctgcggccagagatcagtgcttttctgaataatttcacatctcagtttatggaaatcagtctcggatttttcttcctttttcttgaaataatatgaagtacagtaggcaaaagcggttgccagcatccaaaataaataaaaggtatggctaagtatttcttgaagtataagctgaggctccgggcttttgatcatgatcataacacataataagcctaggcagataagtgaagcccatcgccatctgcggcattgtgctgcataattttcgaatttttgttttcgttttaccagcgcttggagcatctgtttggtcggcgcgtctgtaaactgatccagctgattccataaggattccatacgcttcacaccttgtccattttcattgctacaatatatgaacgtaaaataaaaataataccctattcatccattaaggggatgtccaaaacttgtccggtgtaaacatcatttccattcagatgattatacgctcgaattttttcttctcctgtccggcttttataatacttcatggaaatgcggtatagcgtttctttcttttggacggtgtgcttgacaacgcgattcggcacattttgaactggctcagctggctgttcttgctgttgtactgttgattgggaagaggaagcagccgcggcggttgcttcctccttatttgccgagtcttctttatccgctacagcagtctgtttcttatcagcagctgtttttgccggctcttttggcttggaatcttcaggctcttgttttgactccttctgcagtgcggtttctttagtgtctgcggtatcgtttttatcctctgatttcgggacaacctcatatttgctttggctgctgtcaataaaaacatcttcataatcgtcatgattatccgggtggctctttagataaaataaggtgactaaaacgataaccggcacaaatacaaatattactgcgagtactgtgaataatggcgtttttgttttgccttgcttttttttctgttctctttgattttttacagattgtcttgtcggaaggctttctccatcatcgacataatcgtccgccaatgcggcgttttgatcttcataaagattctgggcttttcttctctctactctcgacatgttcgtcatgtttatccctcctcacatgttcaaaacgaatctgacaggcaaacacggcatcaatgataaaatgcgccgtcatcggaacaaataagttgccggtccattcatacatcagaccgagcaaaaagctgattgctgtcaccataataaataacagccattttgacaaataccgaaagtgcagagcggcaaatataaggctggccgcccataaaccgatatgagtctgcagcactcctctgaataacatttcttccgcgaaagcaatcagaagcgttaaaaatataatatgagggattgacctcttactgaatatttttttattgattccgccgtcatcatataaatgagacggaaaccatttcattactgccatatcggctaaaataacaataacagctatagaaacaccataccagatgattcgcatatcgcgaatgtcccagagctttaatacgtcccgtacatcctcaaaaaagaacagtcctgctgcagcagcggcaaagatgatgagtagctgcgtcaaatataactgcttcagcatatcacggtcagacatatgctgaatataatctttttgctgtttcagttcagctcacctacagtctgcaagctgaatatccggtgcaattccgaactccagctgtctaatggcgccattttactccgttcccctttttgttcatacaaggataaatcaaaaccgcaatgtgaacagcacgggaggtttccgtcatcaggctcgtatgattcatcaaagtaggttaatagtgcctgccttaaacagccatcacgctgaagcaaaaatgatacacggtgcattttttccagcttcagctccatgcgatatgaaatttctttcttcatcagttcaactgatgttttcccctgcataaagagatgaatcatcatacgggcctgtgtctctccgacgccatactgaagtaatacgtcacgaagccttctctcatcccgctcctccgtcttctctagcacacggatcacgtcggcgatttcttcagctgtgacactctccatctggataatctgttcctgcaattcaaaatcccctggcgcccgcagcaaaatgctgacactcggctttccgtcgcggcccgctctgccgatttcctgcataaaagcttctgccgtctgcgggaggtgaaaatgaatcacatatctgatatcgggtttatcgacacccattccaaacgcattcgtacaacatatcacatcaagctggttatgaataaactgctgctgaattaaaatccggtcccctgactccaaaccgccatggtaaaagtcggctctgctgctcgttttgctattaatttcacccgctaattcctcggcccatttccgtgtcggacaataaacaattcccgggccttgcagattttcaaccagctgaatgaccctatctattttttcggcagtatccgccgcattttcaaccctcagtgcgatgtttgggcggttgactgagttgagatggcgtacagcatgctgcagctccagcaggttcatgacatcttgcagcgtttcctttgtagccgtggcggtcaatgccagaacgggcgggtgaccaagtttttttctcagctgcccgagctttgaataatcaggcctgaagtcgtgtccccattcagaaatacaatgcgcttcgtcaataacaaataggctgatcgggacgcttttcaatttttccaatacatatggagactgtaaagcttcaggagacaagtacaaaaatttatatcgatgaatatgttctaaaacaaattgtctttcctgcctgttaagcatgctgttcaaagctgcagcacgcttttccccccgggctttgagctgctgcacctgatcctccattaaagaaagcagtggagaaacgattaataccatgccgtcaagcatataaccaggcagctggtagcaaagcgatttccctcccccagtcgggagcattgcaatggtatccttcccgctgagtatgctttcaataatgtcctgctgcccttttttaaaggaagtaaaaccaaaaaactgatataacgtttgctgtaatttagtcatattgctgcacctgctttgtcaatgccagtctgatttgaaagtagctgaaccgctgttccagcccgtcgcgaatttgtttgattttattcgtccgcatccgtttggcaaactctgcgatttgaagctggtcttctgctgatacatagtcattaatcataaacgcaggctcatggagagaaatctcgacaatgtggtcttcaatcgtcgctgttttcagctttctgatttcagcaattcgctgtatcggaaacccttgtttgaccatctgccatgttttcctcgtcgactctgtcagggcattatctaagtgcacatcagaaaggagatcctttaacaaagcatcttcacactccggaagagaatgaataaaataatgtaccgaagcccaaaacatgatatagacataccattcgtcttctttcagcgtatcagcaagctgcctgctcgtataaccgatccgatggtgcgaggttaaggagtagacaaaaatttgcgctgctttgttttcaatctttttcaaatgcgcctcaagcatggcaaaaaggctttttgccatctctatatgatccgtatgccgggacaggtatttctttacccagtgaagtgtcttatgatcctttgtgacagggatatactgcctgctcccttgctgtttatgggataggacctgcacaagcagcgaaagccttttccaaagcacgccggcagcctgctgataatgagcgccgtgacaatgaacgggccaaggccgctcgctaagggcatgtctcaaaactgctgcgccgctggctgtcactttgtatgtatctgattcagacattggcgcgagatatgaatgcttttcaagcttgtcaagcgacgcagaaatatcgcttctcgaacattttgccgccattccaaagtattttgcagtctgaaataagccggcatcttgaatggtctgtgacgatctcttgcctttgaataggtgaaaaacagcgcttcccgaccgttccccgtttattttgcaaagacaatcgagaaccataatatcgaagtaatttaatgacaacctatccacctacattcttcctgacaaaaatcgttgatttgctctttttattttaacagatttcaaacagaaatcgacgtttaaagtcatcattaagggggatgttatgtagataaccccttatgtgataagcattctcaatcatttttctgttgaaatgtggcagcaacatcattacaataagtaagaggaataggtgttaaattgattaaatataaagattgatccatttgttccaccaagaacaatctgggaggttttattcatggcaaagtacacaatcgtagacaaagatacatgtattgcatgcggcgcttgcggagctgctgcaccagacatttacgattacgatgatgaaggcatcgcgttcgtaacgcttgatgaaaacaaaggtgttgtcgaagttcctgaggtactggaagaagatatgattgacgcatttgaaggatgccctactgattccatcaaagtggcggatgagccatttgaaggcgacccgcttaaatttgaatagaagtaactaaaaaaagctcccgaacgggagctttttttagttaatggatatgtgcacttcgctgctgctcaatccatggcttaagcttgataaaaattagtgagaatacaaccgtaattacaataccttttatcatgttaaacggcaggatacctgcgacgactgctgtttttagcgcgctgtcggataatgccggtgaatgtaaaaaccatgtgtatgccggaagaattagaacataatttaaaatactcattaaaatggtcatcgctgcagttcccaaaagcaggctgacagccaagccctttgctgagttgagttttttaaataagaaagcagtcggtaatataaagagtgttcctgcaataaaattcgcaatttgccctacaggaactccggccatgcttccctgaatgatatactgaagaacattttttatcgcttctacggcaatacccgccaaaggtccgtaaatcagaatggcaataatagcgggaacgtcgctaaaatcgatttttaaataatccggaagacccggaaacgggaaatttaacagcatcaaaacaaatgcaatgctgctcagcatgctgaccacaactaatttttttactttcacttcattctctccttttcgatcacatcttactcgaaaacggaaaggttcttttccagccaataaaaaaaccgcttcatatataaaagcggggtttcgaaaattaggctaggcaaagaaacgtttgaaaaattcaatttcaaaacgcttatgaacctccatcttctcccatccagactgtactgtcggctccggaatctcaccgaatcctgctgtaaagacagctcgcgggcttagagccattggctcatcaccgccggtagggaatttcaccctgccccgaagattgatcatatgaaatttaattacattataaacgataactggttggctgtatagagaattgcttcaaattaaatatattacctgcaagctatcagatcattgatttattaggctttacttttatcctttactgcgtcaatacacgttgacactcttttgagaatatgttaaattatcagatatttagtttgtcaatttaggaggaaatctaacgatgtttcgagtattggtctcagacaaaatgagcaacgacggtttacagccacttattgaatcagactttattgaaatcgttcaaaaaaacgtagcagatgcagaagatgaattacatacttttgatgctcttttggtgcgaagcgcgacaaaagtaacagaagaccttttcaacaaaatgacttctttaaaaattgtcggaagagccggtgtcggtgtcgataatatcgatattgatgaggctacgaaacacggggtaatcgtgatcaatgctccgaacggcaacaccatttcgacagctgagcatacatttgcaatgatctcttctttaatgagacacattccgcaggctaatatctcagtgaaatccagagagtggaaccgcacagcttatgtcggttcagagctttatgggaaaacgcttggtattgtaggattaggccgaatcggaagtgaaattgcacagcgtgcgagagcgttcggtatgactgtgcacgtttttgatcctttcttaacggaagaaagagcgaaaaaaatcggcgtaaacagccgtacatttgaagaagtgcttgaaagtgcggatatcattaccgttcacacgcctttaacaaaagaaacaaaaggcttattgaataaagaaacgattgcaaaaacgaaaaaaggcgttcgcttaattaactgtgcgcgaggcggaattatcgatgaagcagcacttctcgaagctttggaaaacgggcatgttgcgggagcagcgcttgacgttttcgaagtcgaaccgccagttgacaacaaacttgttgatcatccattagtcattgccactcctcacttgggagcatcaacgaaagaagcacagctcaatgtcgctgcccaagtgtcagaagaagttctgcagttcgcaaaaggcctgcctgtcatgtcagctatcaacctgcctgccatgacaaaagatgaatttgctaaaattaagccttaccatcaaattgcaggaaaaattggcagccttgtatcacagtgcatgaaagaaccagtacaggatgttgccattcaatatgaaggcacaattgctaaacttgaaacatcgttcattacaaaagcccttctgtcaggctttttaaaaccgcgcgtagactctactgttaatgaggtcaatgccgggggtgtcgcaaaagaacgcggcatcagcttcagtgaaaaaatttcctcttctgaatctggatacgataactgcatcagcgtaaaagtgacaggagaccgcagcacctttactgtaacggctacgtatattcctcatttcggagaacgaattgtcgagatcaatggatttaatattgatttttatccgacaggtcacttggtgtatatccagcatcaagatacaacaggtgtcatcggccgagtaggacgtattctcggagataatgatattaacattgcaactatgcaggttggccgtaaggaaaaaggcggagaagccatcatgatgctttcctttgacagacatctggaagataaaattgtgaaagaactaacaaatgtccctgatattgtgtctgtgaagctcattgatctgccctaatcaaaaaaactcaagctatctatatagcttgagtttttttatttctatccccgtgtgtttttatgcaaaatatctaagacactccttagctcagaaacaggaatttggcctggtgcggacgcctcttctccagctccaaaagtacaagccgatccaaaaacctcaccgctcagcctgctgatgagccctgttgcagccattgacattgtaataatggggcggtctgcatattttgttttcattgtatacgtcgcatcaagcagtgttaggagatctccagtatcattcggcatgacagccatttttggaatatgcgcgcctaagtcctgcatttttcgaagtctggaaataatttcatcttttacaggtgttttttcaaagtcgtgatttgacatcaccacatagacgttgttttcttccgccagcgatactaacgcctttacatttgcatctcctgaaaataattcgatgtctatcagatcgatgtcttttgtttggattgccgattctagcaaagcaagataggaactttcgtccatctccatgctcccgccctctttgtgggttctgaatgtaaatagaaatagcttgtcttctaaagatttacgaagcttagaaatgagctttgtgaccgcttctctgtcattcgctttttcaaatacgtcgactctccattcaacaatgtccggattcagtaattttactgcctctgcttcattcagaatttgtttttccgtctttcccatcagcggaacgatgattttcggcattccttccccgatggaaactcctttaattgttaacacgttcactcatctcaaatcctttcaatcgttaccttgttttattatacacgtacaacttttttttgaaaatttctattatatgaatagcaactaaaaaagagcctcaaagggcccattttagtttaagaaaatcggatttggagcagccggtaccggaattgcatctgatacgtcatatttgccgattttgtttgttctggtttcggtaaaggtcacttctgtgaagccaaactcttttgcggttaaaagaagtccctcaatcattaaaatactggcaatagaatcctcaacttctgagtcctttgagaaacggatatataagtgcttctgtttcttcgttacagattggacagtacccgcttgaataagcggtgttgtatctttttgactgctcgattccatttccttaatcgcttcttttactgtatcaaaagaatgatttgacggaacgagaaagtcttgtccttgtttattttggtacaagtagtaggatcgttttgactgtttgggaatcgaaatttccgtaaaagtgccatatgagccaatccgaaccccagtctcattttgatccgataaaaatttgactttttcataaggactccattttaaggattctttaagcaatttttttaacagtgtatcatcttttacagaaaatgccgtagctggctgatggactcgtatacttaattccttctgctttggtttttcttttatttctacttcatctatgaaggatggaattgtaatggcatgatccaagatatccaattcactacttacagtcagcatgtcctggatcgtttggtatgcatttgttttttgaatgctgacgggtataattgcagatgtatcggcatcagcaactgctacagtgatgtaattgtcttgttccttttcaggtacaacaaacgatgtatgatccagggatgatgcagcttttgggctgtcttctgtctcagttttcgttactgcgttctcttgggacgcttctttttgttgaggctgtgcctgatcaaagaaatgaggagaaataatgaaggcgatataaaccgcaattgcagcggcacacgcggggccaatccacctgacagcgggcttatttttacgctttgccatcgtcagccgcttgtaaatatcctgaggcgaacgatggtctttaactgccggaagttgacttaacaactcctttatctgttcttcgttccattctgacttcatcatccattagctcctccctcaaaagctccatatgtttccgaagtactttgagccctctgtgttgggtcgtttttactttgctttccgagaagcgcagagccttggctgtttcctgtattgaatatccctgaataaaccgcaagataatcacagctctttgatcgattgtacattgatcaagcgcagcataaatttcccggacattttcatgttgaacggcaagttcgtccggtagcaattgctgatccctgacatcctgtgtatcccagtcaaatgtaccgagtatacgctgtctgattgtttgctgtttacggaaccagtctatcgcaacatggcgtgcgatagacaatagccatgttttttcactgcttcttccttcaaacgtatgataagaatttaatacccggatataaacctcttgaagaaggtcttctgtctggtttttatcctttaccatataaaataaaaattggtacaaatcttgatgatatgtatcatataataattgaaaggtttcttccatttgaaacccctccgttcacttttttgtcgtatgaatagcttgaaaagttacattacaactatattacgagtaactggaatttggaagggaatttatattaacatatccttaaattttattaatgttggctattaaaaaaacacccgctcagtcagcgggtgtttcttatggaacaagattcttcggcaaattcagactcgattttaccgttttgtcggaatataaaaagtaaatgttgttcctttatctattcggctgtgcacagtgattgatccgttgtgggcttccacgatatttttaacgatagccagccctaacccggttcctgctctgccccttgtccgcgctttatctgccttataaaaccgctcaaagataaatggcagatcttcttccggtatgccggacccggagtctttgatatcaattttcaatccatccttcacagaatggactgaaatggagacactgccgccggctgaagtatgccgcagcgcgttatcaatcaaattggtaaatacctgctccatcttgtcttcatcaaacataaattcctcttctgtgagagaaatgtcatgatctaaagcaatatttttttctttcgcaacaccggaaaacttccggatgatcttttctaaaaactcattcacattgattttttcataatgtaagcctgtatggcctgattccattcgggctaaatcaagcaaatcattaactaaacggcccattcggagtgattcgtcataaatgatttgggcaatttctttccggtcttcttcagagcttgcaatgtcatcaacaattgcttcactgtatccctgaagcatggagatcggtgttctcagctcatgactgacatttgcgataaagtcctcccgcagcttatcaaggcggcgttcttctgtcatgtcacgcagtacggcaactgctcctctgacgtgcgattccgcataaagcggcgacatcaaaagcacccatgatctgccttgcagcgtcatctcaatcatttgttctttttcagtgctgacagcgttttgaaacagctcttttgcttcaggcggaaggttgtcgccttctttgatattcatgttctgttcataataccaagcctgaagaaaacgttcagccggcgggttggtcacaagaatcgtaccgtcaatattaatggtaataaccccgtcagccatactgctcaaaatgttagaaagctgctctttttcttgattgagcgcattgatatgaaagttaagctgccggcccatttgattaaaagcggtcgccagttcaccgatttcatcctgagttaaaatcgggatttttgtatcgaacttgcccttcgccaaatcctgcgcgccttctctcatttttcggagagggtacgtgaccctgcttgataaaaagaatgcgaaaaatgtggtcagcacaatcgcaattccagcggcaagaaaaatatagcgggtcgtatgttttgttgtatctttaacggcaagcaaagactgggataaaaagaccatgcctttctttccgtctttttcatacgggacacctacaatcaggcgttcattatccgtgtctgtatcgctcagtcccgtccgtttgcttacttttttatggtctttgagagctttatttaagtctttgtcatgctgtatttgctcaaccgtaatagacgacaggcgatttttatcattcggagaataccagtggttcttctcatcctggatgatggcaatgcttgttaagttatcagcgagttcccaagtgattgaccttgccagtgcctggtcctcgtgattttctaggatgacagcaactttattcgcaagctgtgttaaatcattctcagcttcttccacatggtagttttcaataaactccagcaaaagaaccgttaaaatgaacaatacgatcaagacgagtgaaaggatcgtaaaccacagcttgcctactacgcttttccaaaatttcattcagcgccgacctcaaatttataacctacaccccatactgtgacaatttttttcgcagcttccggagataccttgttcagcttctctctcaagcgtttgacgtgagtgtccactgtccgtaaatcaccaaaaaactcatattgccacacttctttcagaagcttttcccgatcatacaccttgtcaggcgttttcgctaagaaatatagaagctcatactcttttggcgtcaggctcacttctgttccatcagctgttacgcggtgagcatcatggtctattgacagatgtgaaaacacgagcacatttttcgtcggtgtattggcattgaaataagaggtttgggatgctcttctcaaaagggcctttacacgcagcacgacttctctcgggctgaacggcttaacaatataatcatctgttcccgcttcaaacccctgcacccggtttgcttcttctccttttgcggtcagcatgataatgggtgtcgcttttttttcacgaatttgccggcacacttcaattccatcagtccccggcatcatcagatcaagcaaaattaagtcataattggcttcaagccctttggcaatggcttcatcaccattttcagcttcatctatagcataattttcacgttcaagatacattcttaaaaggcggcgaattctggcttcgtcatcaactactaatatttttgtttcgttcgtttggtccatgttttccccctgctttccttctgttactttcattttatcaaatcgtgagaaagtttgagaactgtgtcgctttcaaaggactatgcataagaatgaagtccggcaagcacaagatttacgaatattaaattaaacataataatagcaaaaccgattacggccagccatgctgacttctcaccgtgccagcctcttgacagtcttaagtgcaagtaagcggcatagaacaaaaacgtgatcagcgcccatacttccttagggtcccagccccaaaatctggtccaggcgagctgagcccaaatcattgcaaagatcagcgcgccgagtgtaaagatcggaaatccgattgatacggccctgtacccaacctcatccaccagatcaagattgacgtttttcaccagcggatgtaatagagcgctgattctttttctgatgatcagacggagagccccatacaacacaagacctgctccaaatgaccaaatgacagtgttcacttttctgcctgagaaaagcgcgggaagatcaacaagcggttccattcttccttcggtcaaaagctctccctgatgcggaccgacaagcgcgggcatttcgtacaccatcacgtttttttctttacttttgtccacccagttaaactccgcttcatagcctgcaagacgaaatgctgatgtgattgcaataaaggcgacggttgtgaccaggataaacataatcgcttcaagccagaaggtctttttgcttggctttgtctggtctacatgcttcaaaagaaagatgacaccagcgacaaagctgatggcaagtatagcttgcccaagcgcggccgttgttacgtgaatatacagccagttactttggagcgaaggaattaaaggcgagatatctgtcggaaacatgctggcgtaggcaatcagcaataaagcaattgacagcgtaaacaggcctaatgaaggcaatctatagagaaaataaagaatgataaacgccaaaacaagcatcatgccaaaagcggtggtgaattcaaacatattgctgaccggcgcatggccgctggcagcccaccttgtgatgaaatatccaaggtggcagaaaaaaccgacaatagaaagggtgattccaatgttggcccatcggtttggcctgccctttttatctttattcccgcgtatggccccgccgaagattgggacagcgattaaatacacaagaaaggccgcataaagaaaatttccgctcagctctgccatgacatcactcccttttcgcctatttctgtgttttgattaattctttttggtccaccggttcagtcagtccggaatcagccaatataaatgctaaatccttcttcaggccaaaccagtttttattggtatgccccgctaccataactgcaccgtcctgtgagtgcagccaaattcttcgatgctgccagtacataccttgaataacaccgatcataaaaatggctccgccgacagcaagcacccagagtgtcagatcctttctgactgtaagtccagtaatgtttttcgtttcgacatggtcaaatttcagcttgtatttattattgcctgatccttcgatggtttcttggatggcgacaaagctcttttcgcctttcggtttgtccggcgttatgatattaaagacaaaagccggattgttagggatctttgtttttgtgctcggctctccgtcctgattaaagtagaagtctggcaggtagctggcgatttccaccttgtaaccgttgccaagatcatagaccgaatctggatccagaaggttgatcttcaggctcccaaaggatttttttgtttttttatcaatcagctggaacaccatttggtcaagctgattctctttgtaatccacctggtaaacggaaaaagaatcaaaacgcagcggctgattgacacggatgtcttcttctgttacttttttcagcttcggcttctcgccataaacaattttcccttctctcttgtagagtacggcatcggtttgaaagttctttgccactctaccgtccccgactctgtcaatggcatctgcaaatacctttttttccgttttgctgttataggtctctacgctgaattgattgtttttcaaataatatttcccgtctgtacccggaattgctgcggtttcgccttctctgacccaaagcgtctcatcgacatacatgccaggcacaaatctcagcatcgcaccaaccagaaagatgattaatccaatgtggttgacatacgggccccagcgggaaaagcgtcctttttcagcaagaatgctgccctctttttctctgattctataatgttttttctttaatagagcaactatcttttctttcgattccccgttcagtacagtaaccgtttcactgaacaagcgctgcctttttaaaaaagccgggctccttctgacgccttggttttttaacgctctgtacaacggaatgacccgatcaaggctgcaaatcacgagtgaaatgccgatcgaggcaatgagcagcaaataccaccaagaaccatataaatgatgaaaccctagcaaataataaagctggccgaacgtgccatactgctccttgtaataagtatcagcctgtgcgcccggaggcagataggcttcctggggaaaaatggtgccgaacgctgatgcggcaagggttatgacgataagccatattcccaccttaaccgaggaaaagaaattccaaattttgtcgataatcgttttgttataggtttgcgaacgtcttgcgcttccgtcatatctcatatcagcgagcggaggttgagtttcctgaagagctcttccgcacgattcgcataaaacggttccaaccgggtttatatgtccgcattcacatttgacttgcttcatcccgaagtctctccaggttttatgagattcatatattcgtgtatcatgctttctgtcatagtgccggtcaccaccttgacaacttttccttccggattgatcaaaaaggttgtcggaagcggagatacgtcataggcatcaagcacttggcgatctgtatccagaacaaccgggaaattgactccgtaggatttcataaaattatgtactgctatctttgactccccaacatttacagcgacaatttcaacaccttggcttttaaaatgcttatattggtttgccatataaggaaactcttttttgcacggttcacaccatgtaccccagaaattcaaaaaaacacctttcccttttaagtcactgagctcgatacgtttcccattcgtatcctcaaggacaaaattcggtgcgtcggacccttcggatatactctctttgccggcaaatacagcgttgtaaatggtatagccgagtgcgcagattaaaacgagaaggatgccggtccgaatgaataaacgcctttttttcttcattgtccactgcccccttccccctattgcagatccattcaattatatcattgcacgttcatttcacatttcttactttttgaaggttatgtgaaatttagaaagcgtttttaccgtgatccgccagtgctctgagcctttttacttcgtgaggcgtaagctctctggcatcgcccgtgtgcaggcctcgcaggtttaaaaacgcgtattcctcacgcttcagcttgattacctcatgtccgatcgcttcaaacatgcggcgcacctgtctgttgcgtccctcatggatcgtcagctgaataatgcttgtctgctttttcttatccaaagacagcagcttcgctttagcaggcgctgttttgccttcctccagcctaattccgcgctccaactttctgagcagctctttaggcgggattcctttcaccttcgccacgtatgttttgtctatttcatacttaggatgcattagcttattggcgaattcgccgtcattggttaaaagcaaaagaccgctcgtatcatagtccagacgcccaatcggataaatgcgctgcggaatatttttaaaaaagtccgtcaccactttgcgtcctttatcatcttgcgctgcggaaataacgcctcttggtttatataagagaaagtaaaccggctcttcgcgttcaacctttaacccgtttacctcaatctgatcagaaccggtgaccttaacacctagctctgttactactttgccattcacctttacttttccttctttaatcagctcttctgcctttctgcgcgacgcaactccggcatgagcaatcactttttgcagtctttccatgtctttcacctcaagtattatcttacttttttcaaccttaacaaacaagctttttcaaattcctatgccaaatctaaaaaaaacgccgttttcaggcgctcccaaataataacgtaacgatgatgatagatgcaactacgccgattaaatctgcaagaagtcccacctttaatgcatcacccatttttttaatgccgactgctccgaaatacacagtcagtacgtaaagcgttgtatctgtagatccctgcatgacggaagccagcctgccgataaaggaatcgggcccgtatactgcaattaaatcggtcgtcattccaagtgcggccgtaccggagatcgggcggatcagagcaagcggcactacttcagcagggatgccgatagcggagaaagccggttttaaaagatccattataaaatcaagcgcgcctgatgatctgaaaacagttatagcgacaagcattccgactaaataggggataatggaaaaggcaatttctatcccctctttcccgccttcgacaaacgattcatatgtgggaacctttttgatcgttccataaagaagaattccggcaataatgattggaatcatggctaaagacagccagttgatgatttccatccgctcaccttcccttctttttgcggcggtaataaaaataccgatcaatgataatggcaccgattccggaaataagcgttgccaaaatgcttggcccgacgatatctgtcggcgttttggaggaataagccattcggacagcgatcaccgttgtcgggatgagtgtgatgcaggacgtattaacagctaaaaaagtaatcatcgaccggcttgcttccgatcggtttccgttcagctttttcatttgttccattgctttaatgccaagcggagttgctgcatttccgaggccgaagaaattcgccataagattagataaaatatagcccatcgccgggtgatccggcggtatatcagggaacagtttagatataaaaggtctgcacatccggctgaaaatatccaaaagccctgactgctcggcgattttcattaagccaagccagaaaacaagcacgctcatcaatccaaatgagatcgtaatcgcttctttcgcacccttaaacacggcttcatttacatcttgcagagttccgttgcacatcgcaaaaacgagtccgatcacggttaaactgacccaaattatattgaccattttgctccgcctgccgcattcagaaagattgatttaaacgtttcaaaaaattgtttcttcggtttttgatgccgctcattttcataatagatcggcacttttgcgatggttgcatcgttgaacatgatctccatgtgccctacgatgtcagggattttcgaggcatctttttcccatgcttttttcggcttgagcagtgtggtattaatttttacattttctttttcctcttcggtcagtaaataggtgatatcacgtttgataaaagccttcgattcataaaatgtgcctttcagctttggaatatcccctttttttgcaattaaataggtttgataatgctcaaacacatagttaaacatcttcatatggtcatcccaatcattagggtcattaatggtgacggctatcaggtcaatgccgtcctttgaagccgtagagaccagtgtccgttttgcaagttttgtatagcctgtttttcctcctgtgctgtacggataaagcatggtcagcagtttgtttttgtttttccatacgctttccatcgtttccgctttgtatatttttgtgcctgaaatcttttgatagtctttcagcttcatagcatacttagttaaaatggccatgtcataggctgttgaataatgattttcatggtcgtccaatccgtgcgggttttgaaaacgggtgtttttcataccaagctgctcggctttttgattcatcatataaacaaacccatcgaggctcccaccgacatgctcagcaatcgcgacagcggcatcgtttcctgatcttagcatcaggccatacacaagatctttcagcttcactttttgaccttctgttaaataaatggcggagccttctgttctgacagcatttgccgaaaccgtcactgtttgatccattttgccggattcgatggcgaggacggcggtcataatttttgtgatgctcgcgatccgccttttttgatgctcatccttggcatataacactctgcctgacgcaccgtcaataatgatcgcgctttttgcactgacatctatagcagcatgtgctgtattcacatttacggttgcaataagaaaagaaatcatgatcacgaatactgcttttttgaaaatgcgcatgtttgctcacgtccttgtggtggtttgtacaagtttatgcgcatgtccatcagttatgaataacaattatatttctggaagcaaacataaaaaaactctccctgaaaaagggagagtaaacgttatctgattggcgccatgcttgatccggacgcttcgtaatgagccagctcttccctcatcttcagaaaggccgcgctcaacggcaataataattgctcaagcgacgcaggaacagcatgataaaactcaattgcgctgaccccggtataagacgcccggctattttcacaccacgtgtcttttttcggcataaagaactcttcaatgcattggtgatacacattataaagtgttttttccgctctggcttcctgaaaaggctcctgcatcaggagacgacggcacgcttctgcgcctccttcacaaaatactgccattcttctcagagtgctaagcacatcacagcagtatcctttttcaataggcaattcagcctgtaaggactcaagcgtcgtttgatttaggtaatcgttcacggtattgacaaccattgataagaattcgcctgttttttgagtctgcgctcgcacaatcgaatgtcccatttcgtttggtatcttcccctcatgtctttgtctctcacattttgcttctttcatgatagcttcttccttatatcttatgatgatgaaaaagcgcgattcattaaacttctattttatatcttcgaaggtttggttaaagttttcaaaaaataaatctgcttcttcttgaagaacgtcttcttccgcattttcaggcagcggcggaagctcgtccagcgttttcaggccgaattgttcaagaaaagtcggcgtagtaccgtataaaatggcccgccccggaccatcggcacgccctacttcacacaatagcgccttcgcgacaagactgtgtaaaatccgctctgattttactcctctgatttcttcaatttctgctctcgtaattggctgtttgtatgaaacaatggccagtacttctaaagatgcttgagaaaggccctttgacggcacttcaatcagttttttcaagtaaggcgcaaagtcttttttggtagagagcatgtacgtatctgcatactcaataagttcaatccctcgtgtatctccgcggtattcgtccgccacatccgccatgatcgtgttcagttcaggctcttcgatttcaagcactgttaacagctgcttttttgtaagcccttcatcgcctgccgcataaagaagggcttccacaatagctttccaattcacgatatcaagccccatgaatggattcactccccgtaatgtaaatatctgaaaaattgtgctcctgttcaatgaggaccagctgatttttcatcagctcaagaacagctagaaaggtcactactaaatgttctttttgttcatatggaaacagatccataaagttgattctcgttcctctagatttcaagctgtgcacgatttcgttcattctggcttcgattggtatgtcctgtcttgtaattgttgtttccatcggcctgtttatttttttgcgtttcagcactttttgaaaagctccgatcatatcatagaccgtgacagagagcttttgctcagactgttttacttcttttgcatattcactcaaatcactcggcggtttcgtgaacgatttttgtctttcttcttcccgttcttttaaatccttcgccgcatctttatattttcgatactcaatcagcttttcaatcagttcctcccgcggatcttcttcttcaagtaattcatcttcaaaaagctcctcctcttgcttcgggagcagcattctgcttttaatgctgagcagcgtggcagccataaccaaatactcgctggccatatcgagctcaagcacacgcatcgtatgtacatataataaatattgttcagtgatcttcgccacaggtatatcatatatgtcaatttcaagacgattgattaaatgaagcagcaggtccaatgggccctcaaacgtatcaattttcacttgatattcttccatcatctcaccattttcaagtatcactctcattgccggaaaaactggctaccctatagtataagccaccaaaaagctctcgtccaatactatttcatttcctgttttgaacaagtttgtacagaatattcaaaacacgagaggtgtttgctcggagcgcagaagcgggagaaaaagccttagcttctggttttcctttctaagaagcaatagaggccgagcgttcttttttccttttatcccttctatggtacactaaaagcacattaaaggaggaagcaccttgtatccgaaagcttatatagattatctcgttgagtttcacgcgacacgggattattttgaatgccatgaaatattagaagaatattggaaggaagatccgccaaagaaacgaaaacgctattgggtgggctttattcagcttgcagttgctttatatcatcacagaaggcagaatacagccggggcaaaaagactgatggcgaacagcatccggattcttcaagcagaacaccgggcagtcgaagacttagggcttgatcatggccgtttgctcgaacttatgcaatcggtttacgaacaaatcgaaaccggctctgcctataaaagcattatgctgccaatcaaagatgagaaactggaggaagcatgcaggatcgaatgcaggaaaaaaaagtatacatgggggcagcccagtgcactcaggaacatatttcttatcgacaaacatcgtttgcgggatcggactgacgtcatccgtgaacgtgaaaaagaaatagaacgcagaaaaaaaagcagagactgatcacagcctctgctcagcgtgtcgacaaaccctcgcattcgttgtcaagcctgtgcgttggtgctcacgaatgaaaacattcgctccgctccaatgctcagctttcctagacttcaagggttttcaatcgcgctgaaaggatgacaaaaacctaaaacaaaactgttttcggattttgtcatcaaactaaagcagaggctgatgacagcctctgcttaattattgtatgaaatgtcttgatcctgctgaccttgacaacgttcgaaaaagctctgcgttaattcatttggaaccagtacttgcgttttgaataaatgctttaaagcatccatcatctgttttccgattccttgatggcgatgagaaggattcacactgatatgccggatctcaacctcagaatcctttttttcgactccgattgctccgacgatatcctcgtcctctttccaaagaaagagctggcggtctgtatccgtttcgtagtccttaattgtctgctgaagctgcttaaggtctttttcattcggcataaacgaaagaagccccatcgcaatcttttcaaacgattttttataacgaattaacataaaaacccctctatatccaaaatgtccagtctgctattaacggatacgaataggtgatccgttttctcacattatatcattttcgccatatttttaaactgttttcagcaaattattcaaatgagcggtttaaatttgccatttcaatggcagaaacagcacaatctacacctttgttgcccgcttttgtgccggcacgctcgatagcctgttcgatgttttcagttgttacaattccaaagatgacaggtacaccagtagtgtttgctgcttgcgcgatgccttttgcagcttcattgcagacataatcgtaatgtgtcgtcgcgcctctgatgacagtgcccaatgtgataatagcatcatatttttttgtttccgccatttttttcgcagcaaacggtatttcaaatgcgcctggaacccaagccacatcaatgtcatttgtgtctacaccatgtctgagcagcgcatcttctgctccgctcagcagcttgctcgtaataaaatcattaaatcttcctactacgattccgattttaagacctgtaccaactaaatttccttgtatgatattcatatgattcccatccttttttgtgatatttgtgattagaaatgaagtaaatgacctagcttgttcattttggtttgcaaatattttttattgtgttctttcgcctccatttgaatcggcactctttctgaaatacttagtccgtagccttcaaggcctgcgatttttcgcggattattcgtcaaaagcttcatattccggacaccgaggtcgcgtaaaatttgtgctccgatgccatagttgcgaagatccggcaagaatccaagcgcctcattggcttctacggtgtcataaccttgttcctgaagcttataagcttttaatttattgattaaaccgatgcctcgtccttcttggcgcaagtacagaagcactccacggccttctgcggcaatttggttcagcgcggcgtgcagctgcggtccgcagtcacagcgatgagacccaaacacgtcacctgtgagacattctgagtgcacccggaccaataccggttcttctccgaacggcacctctcccatcacaaatgcgacatgctcttttccatctacctcatttgtgtatccataaaccttaaatgtcccaaaatcagtaggcagcgtaatgtcaacttcacgctcgacaagtgttgtcagattgtaacggtattgaatcaaatccttaatggtgatcatttttaattgatgctttttcgcaatttcaatgagctcaggcactctcgccatcgttccgtcttcattcataatttcacaaatgacgccggctcctggagatccgcaggcttcagcaagatcaacagcagcttctgtatggcccgctcttttcaggacacctccttttttcgcaatcagcggaaaaatgtgccccggacgctgaaaatcagatggcacggatgtgctgtccagcaatgcttgaacggtaaaagatctttcttgagcgctgatacctgtcttcgtttcacgatggtctatacttacggtaaatgcagtgtggtgagaatctgtattatgctccaccatagggtgaagatcaagcctgtctgcgatttcctcactgagcggcgtgcagatcagtcctctcccatgtgtcgccataaagttaatgacttccggcgttgcatgctcggcaagagccacaaagtctccttcattttctctgtcttcatcatctacaacgatgatgacttcgcctttttttaaagcgtccagtgcttcttctatcggatgaaacatgcaaatcttcctctctaaaagccgttttcgcttaagaaggcttttgtaatggtttgttgggtcttattttcattggctttatgcaaaaatcgatacatatattttccgatcatatcgcattcgatattcactttagagccgatcgttttttctgaaaagatcgtttcgctgatcgtatgcggtattaaggagatcgtcactgtgtcttctgtcaggccgaatatggttaagctcacgccatccacagtaattgatccctttaaaaccaatgtttttgttaatgacgggtccatttttaaatcatagtaaactgcgttgcttttctcttcaattcgtgtgatttccgcagttccgtcgacatggcctgagacgaaatggcctccgaaacggccgtttgccgccattgctctttccagatttactttgcttccttttgttaaatcattcagtgacgtagctttgactgtttcaggcataacatccactgtgaattgattttttgtaaaatcagtgaccgtcagacaaatgccgttcactgcaatgctgtcgccaagatgaacatcctctaaaatctttgagcatttaattgttaaggccattgaatgccctgcttttttcatggattcgattgtgcctgtttcttcgataattcctgtaaacatggtcaccatcctattcctttgtcggttttgccgtcagtttgatatcacggccgatttgggttatatcagtaaattgtaataaggggacatctttcattgattgaaaaccttcaccggagattaagctgggagcatgcgttcctccgattagtttaggggcaaaatagaagatgatttcttgaaaacagccttctttgacaaagcttccgtgaacagctgaaccgccttccacatacaccgacatgatgccttcttccgctaggatcttcaaaacatcaggaatttgaatgcgctcggtttcaagtgtaaatatgttcactccgaaagctgaaagccgttttttcttttcctcgtctgcgcgtgccgtcgtaaaaatccatgtcggcgctatttgatcgcaaatcactttagcgtcctcaggaatcgagagtacggtatcaagtatgacccgaaccggctgttttgttacattcggcagtctgcaggttaagcttggattgtcggctttcactgtgccaactccgactaaaatgctttggtgtgttttcctgtattgctgagcatcctgtcttgcagcctctgacgtgatccatttgctgtcacccgtgctggtagctatcttgccgtcaaggctggcagccgcttttagcgtgacgtacggaaggcctgtcctcataaagtgcagaaatttttcattcaggctctccgcctggtctgccaggatgccttcccttacctcaatgccggcttctttcatcatgctgatccctcttccagccacaagcggattaggatctctcatcgccacgaacactcttttgatgccagagttgataatcaattctgcacatggcggtgttttcccgtaatggctgcacggttcgagtgtaacgtaaatgtcggcaccctctgcatgtgctccagccatatggatggcatgaacttctgcatgagcttccccatattttaaatgggcgcccattccgacaatttgtccgtcctttacgacaacagcgccgacgagcggattggattcggtctgtccttcgccctgcttcgcaagatctaaggccagcttcatataatactcttccatttgtttccctcccctcttttgttatttaccgtcaaaaaagccccgaatttataaaaaattcggggctttaggtattttacgcaataggaaataacactatgcatttttgaaccatttgcatagcggttcatcatccttctcccatccagactttcactgtcggcttcagcttaaactgaatccaccgcgtgcttatgcacacgggtcacgggctctaaagcaaatgtgctttactaccgccggtcgggatttccaccctgccccgaaggatacaatctttattcatttgtccttattggctattatagcgatcctttttaaagtacgcaatgaaataaacttacaatttgagaaaaacaaaacatcacccttcgatccgaaaggtgatgttttgttaatcattcacttttgcaaccttgattaatccgtcgatccgctttgatttgctgaagtatgccttaatcttgtcaccttcttttatatcagataaatcctgatttaatttttttccgttgaagatgattttcgttccgttttctgctactccatgatactctgagccgtcaattttcgtcactttatattcctggatggtgtattcctcttcttccgaggacaaggtttgtccaattgctgtcggaacatccttcagctcaacgtcatttatgtacatataaccgcctgcaagtaaaagcaaaagcactaacagaatggtaatcttggtttttattcttcccatttctaaacctccagccaatatgaatctattcattcatatgagttattcctttttttcatgaataaaaaaccgtaaattctcgtaaattattaatataacgatgcataacgggaatatgtttcacatttctgcaaaaatttcttttctatagatatacgaatttatgttctgttttaaggggatgaccgcaaaaaagatataaaaaagcagcctctcgggaagctgcttgatcctaatttgttttgcgcatttcgttaaacgggtagaaaacaaactttgacgtacccgcaatttgttttttcgtgaagaggccaaggccgttacggctgtccatggaattgcgacgattgtcacccatcacaaaatacttgttatcaggcactttaaccgggccgaaatcatcggtcaaatggtcaaaaccgtcctgtttcgctctctttttattagccgccaaataaggttcgtccacctttttcccgttgatatagagctggtcatttttcatctcaaccgtatcgccgggaaggccgataatacgtttgacatagtgaacatcatctccgtttaacacgacgatgtctcctctatcaaactcgccgatgtatttgactgtcatattaacaaaaaccctttcacggttgtgaagtgtaggatacatagagtcaccatcaacgacatacggcgcaaaaataaagttgcggatgagcaaagcaagaacgacagcaatcacaattgcttttgcccattctaatattgactttttcttcgaaacattttctgatttcaactgatttcctccaataaacaacggtcttcaatttatgttatcacgaatcgaaaaaaaatcccattaggaccattgaagtgattttacaaactgttaatcttcatcttctacccacatcatgcctattttttcttgtcgatcataactaggcctgaaaatattgaaagaaatgaatcgcataattcagaagcgatggactcagaagaaagagagttctcatatgcaaaatctttagatcgtatataaagcatgaggttacgggcagtttgttcatttactgcattccattgatctcccagtccatgatacccatggcacttgacaaaacaattaacgtcatgaaggttactggaatgtttgcggcaacctatttcacaggtgataaccgcaccccgttttttgctttcataatatgtttaaaatcattcaagctcgaaaacatggatcagcctccaaaaaataaatccaatatattcccggcagttgaagactctttattataaaactctgaatatccgcagttcttacagtaaaccactagaaatcggttatgctgcacgtcaaacagctttgataatcccgtgccggttgtggctatttctttttgtccggcttcagtactgccgcattttatacagcctttgttgtccataccgcgatctccttttcattacatcacgtttgtttgatttattttactacaaaataccaatcccaatgaaccgtactactttaaagtttgcttaattttgatcccccgttctttacatactaattgggttcgtttctcagcttggtaaatcttctggagaaacggaaaagctccatgaccaaaacatttaaacccagccaaacaccgccgaaggcgcaacccgcagcaacatcactcggatactgctcattaacgcgtacacacgatcagcccgatgaggaataaaacgataatcatcaaaaaacgcaacagtttgcagacgagccttgtgagaatgacgaacaaaaagataagcacaaaaaccaaaaatgacaaatgccgttaacgtctgttcgctcgggaatggatataatacatgactttccaaaggagcgtgaacaggatgaagggaatgaaagagccgtctaattccctctccataaagctctcgcaccaacgactaggaaaaataagaaagagagttcgattttccggtcttgccctttgaatactgtccaaagaaaagttagaacaataactgctaacagaacatctctagacgcaaaagctttctgaattgcagctgggcccagtctatacccgatccaatacgacatgctcactcccgcacagctccccaatccggccgctaacatgcttagcacccagtttaacttttcttgaaacacgagaacaccggcaaactctcctggtccaagtaaagatagaaactctaacatcaagacaataaacaagacggcatatccgtactgttcgagcaaccccgtcaaaacttgcatgtcattctccttaaacttttttgttcttttatcattcccaatccactttttgtataatcagcacaatttcaccttcagtcgtccaacaacattgtctatggcgggatcttctctcctatactcgtcactcatacattcttttttgacataggaggagcaatagcatgaaatgggaggaaacaaaagatacacagggagtttgccaaaattttgggcagttcgttctgccaccgagtcaggtgtttgtttgcctacctcattccttggccattccccattttccccgtttgaggttcgcaatgataaagtatttcacttagtttcgtacatgaagaggtaaattctttgctcaccgaactatgatagctgcgcatgatgattactgcattgcataaccactggttatttagtgagccgtgagcaatgtatatgcactttgagtcagcacaggatgatcctattacattcgccagaaaagcagctgccgcattcagagtagttaaaagaatagacagatagctgggcttccggaaggaggcgcttttttcgagcatttttataaatcaataaaaataggcatcttctaaatatttttgccgataagtttacgctaatcaactctagcactaatacatataaacaatagaatgatatgaaaggagacttaatagtatgattgattatcctattaatataaacaacgtttccgggaacagtgtaattaacgtaggcggcgcttttatgatcaggcctttaactttgtccaaatctgtgtttggctccggaggtttaaatacaggaattgtctttgaaaataactttgtaagcaaggctaaaatgattaatcatcaatttactgatcaaaacgtcaccaaaactttttaatctattcattacgggggcttgcgatgtctcactaactaaacacctggttttgccaaccgccatcagcactcggcggttttttattgaacatttttacccaataaaaaagctccctctatatgaggaagccttttgcctgccaattagccttctacgcgaacttctttcatgacatcgccgttagacatgtttttcgcgaattctaatccgcttgttactttaccgaatacagtgtgaacaccgttcaaatgaggctgtggctcatgaacgatgaaaaattggctgccgccagtgtcttttccggcatgtgccatagaaagtgcgcccgcctcatgtgtatgcgggtttccttctgtttcacatttgattgtgtatcccggaccgccagtaccagttccgtgcgggcagccgccttggctgacgaagccaggaatcactcggtggaatgtaagcccgtcataaaagccttcgttcgcaagcttttcaaagtttgcaacagttccaggtgcagcttcaggataaagttcaaattcgattttgttcccgtcttctaataaaaagtaacctgttttcaattgtatgcctactttctttattttaattttcaaaggagattatgtatgataggttatagcctgtctctccttgtcgcggctattataccacacctttcgggggaaaacgaatctcccgggctttactaaaaaataaaaatgaaacctgaatctctttatctccgtctaacctaacggaactgtatttttcatgattcaggtcctcacaaagcagcactatccagctgcttgtgaaattgaaggaggtcaaactgctttgaagaaaatttggattggaatgctggcagcggccgttttgctgctgacggttccgaaggtcagtctcgcggatgccgcagttggagatgtcattgtaacactgggtgctgatttgtcagaatccgacaaacaaaaagtgcttgatgaaatgaatgtccctgataatgccacaacggtaaccgtgaccaataaggaagaacatgaatatttaggaaaatatatatcgaacgcgcaaatcggatcgagagcgatttcttcatcgtcaatcaccattgccaaaaaaggctccggattgaatgttgagacccataatatcagcggcatcacagatgaaatgtacctgaatgcactgatgacagccggtgttaaagatgcgaaggtgtatgttacagcaccgtttgaagtatccgggactgcggctttaactggattgattaaggcgtatgaagtttcttcagacgaagcgatctcggaggatgttaaacaagtcgccaaccaagagcttgtcacgacatcagagcttggagacaaaatcggtaacgaaaatgcatcagccctgattgcaaaaatcaaagaagagtttgctaaaaacggggtgcctgataataaagctgacatcgaaaaacaagtggacgacgcagcttctgatttaaatgtcacgcttacagacagccaaaagaatcagcttgtctccctattcaataagatgaaaaatgctgacattgactggggacaggtcagtgaccagcttgataaagcgaaagataagattacgaaattcatagaatcagatgaaggcaaaaacttcatccagaaagtcattgatttcttcgtatctatctggaatgcgattgtatctatattcaaataggaaaagcgccgaaaaatcggcgctttcttttattgctttacacccgttttaaatggcagatcaagttttacaatatcttcgtatgtttctcgcttcacgactaaatgagcctcaccgttttcgacaaatacaacggcgggtctcggaatacggttataattgttggccatgctgtatccataagcgcctgtacaaaaaacggcaagaagatcgccttcttttacttccggcaggtcaatatcccaaatcagcatatctccgctttcacagcactttccggcaattgataccgttttgtcatgcgcttctccgatcctgttggctgccgcagcttcatatttagcttggtaaagcgcaggacgaatattgtcgttcatgcctccgtctacagccacatattggcggacacccggcacttctttttgagagccaatcgtataaagagttgtgcctgcgtctcctacgagagaacggcccggttcgatccaaatttccgggatgtcaaaaccgtaacgggaagcattttctttcacagcttcgataattttttcaacgtattcagtggcatgaagcggttcatcatcttccgtataacgaatgccgaaacctcctccaagattcagcaccttggatacaaatgaatatgaatctctccattcgtctagttttttgaagattttttccgctgctaacacaaaaccggccgtatcaaagatttgcgagccgatatggcaatggacacccagcagctgaatgtgttccgattgtaatacttgttcaatggcccgttcagtttgtccgttatgaagatcgaaaccaaactttgaatcttcctggcccgttgtaatgtagtcatgcgtatgcgcttctactccgggcgtgatccgaagaagaacatcgatggagtgacccgtttctttacataggtcttcaagaagcgcaatttcatagaaattatccaccacaatgcagccgatgcggtgctcaagcgccatgcgcagttcttccctgctcttattgtttccatgaaagtggatgcgttctgccggaaagcctgccgcaacagccgtatatagctctcctccggatacgacatctaaagaaagtccctcttcctcagcgagctgaatcattgcgactgatgagaatgctttgctcgcatatgccacctgtgctttcagccctgcagaaataaacgcctgtttaaagcttttagcacgctcacgtattaaagccacatcatatacgtaaagaggtgtaccatatttctccgctaaatagagagcatccacacctccgatttctaaatgaccatgttgattttgtctgcttgtgccgtgtaagaacaatgtcattccctctttctccgcttatggatgaaaggacagttttatggactgtcccttcataattaagacatacattatcatactcttcagtcagtttcaatgcgattatgaattggtaggctgtcttaagcgatttttggggtgaacgatactgggtcttacttttgcgccaggtttcgctgtgcggacaagaacctgccacagcgcctttccgttaaagggaatcagcggccataagtacggtgtctgaagggatttgatgcttgtcatggcaataattagcactgtaaatccgatgacgagcccttttatatgaaataaagcaacgagtatcatgaggacaagacggctcattttgtttgccaagcttaattcataactaggcgtcgtaaaggttccaatcgccgcaagtgagacgtacagaatcacctcaggagaaaaaaggccgacctcaatcgcaatctgcccgatcagaacagcggcaattaaacccattgctgtcgataaagccgtcggtgtgtgaatggcagccattctgagaaactcgattcctaagtcagctaaaaatatctgcaggatgatcgggatatgcgtatctttatttaaaccgataaatttcatgttgtccgggagcagatcaggctgaagcacaaagagaaaccagatcggaagaaataaagtagaagcaagaataccgaaaaatcttacccatcttaaaaaggtcccgactgaaggcgcctgcctatattcttcagcatgctgcacatggtgaaataaagtcgtcggggtaatgatcacactcggcgatgtgtccactataatgataacatggccttctagaacatgatttgcggccacatccggtctttctgtatagcgcacgagcggaaaaggattatagctttgattaacaatgaattcctcgacagttttgtctgccattgttaatccatcgacatcaatggatgcaatttctttttctacgatctcaaccagatccggatcagctatatcttctatataacaaatgcttaaatccgtctttgaccgctcaccaactttcgtcatcttgactcgaaggcgttcgtctctgatccgccttctgagaagggccgtattgacgacgatattttcaacaaatccgtctctggctcccctgactaccttttccgtatcaggttcttccgggtttctgcccggatagcttctgacgtcaattataaatgcgaaacctgcaccttcaacaatgacagcgacgagcccggacagcacttggtcggtggtttcatccaatgtttttactttttcgacctgggcgttcagcagcctgttttcgacgatgtcgaccagctcatcagggtcttctttccgattgttaatggcaacaagttctctcattaaatgaataatataggctgtatcgcataatccatttagatagtaaagctggatctctttatctaaaatcgtgagcttgcgaacacctacatcatagctcgtccccatcccgacacggtttttgaaatactcttcatttttagctggattccgataaacccgaattttctcttccttgtggtccggcatgatacccgctcctttctaaaataaactcgaccgctttcatggtgattggcgacccttttgagatatcgtcttttctgcccattttgccgatatccccgataccaacaataagcgggagatcaagtttatcaaggcaatagactgtatctccactcattctgtggtcatcaaattccctttccccgactttatcgacgccgtattcagttatttctccattgcggtcaatgcttacatcgaccctggtccattcagcctgatgtgtttttgacgcgaccgcaatcacaccgagcacttcaatagacggatgggttgcgacataggtcagagcggcttctcccggaccctctccttgaaggccggagtcgtcaaacatgacaaatacaggatcatacggtgctgaggcgatcagcttgacaagctcggcgccgctgcgggtggaaggattcccttttgattgtgaaatacatcgacctcccactttgcttgcggcgtattcaattgttttagcggcataaacatccccgtctgttaccagtatgaccttgcgttttgtcgtcatgtcggcattatcctttcggtttgaaaataacagctacgataaaggcgaaaagaatagcggctgagataccggccgaggtcagctcaaaaatccccatgccgattcctataaatccgtgtatatgcgcctgatgcatagcaccgtgcagaagactgtgaccgaagctgacgatcggaacggtggcgcctcctccggcaaattcaataaatttatcgtaaatgccgaaaccatctaatattgcaccgattacaacaaatgatgtcatgacatgagctggcgtcaatttaaaaatatccaagagcagctggccgacgatacaaatggccccgccgcatacaaaagccaaaaggtagtccatgttaagatgcacctcctgcacgctcaaatacaaccccgtgggcgatagtcgggatggtttctttttgctggatcatcgtcgggcttaacagcgccccggtcgccacgacaaatacacggtttaattttccttctctcagctgcttaaaaatatgagagtaggtgacaaccgctgaacaagcacagccactcccccggcaaagacctgctgatccggagtgtaaatcagaagcccgcaatcatcatgctttgtgccgactggatatccatcttcttttaagatgtcttttacgattggagaaccgacgcctgacaggtcacctgtcaggattagatcatagtcatccgctgtccggttgagatctttaaagtgctgcttaatcgtatcagctgcagccggagccatagccgatcccatatcaaaaggatctgtaatccctaaatcagaaacctttccgacagtcgcacttgtgatttggatatcacccggtgtctgactgatgacaactgcaccgcttccggttacagtggaggtagcagtgtccggtttttggcctccgtattctgtcggatagcgaaactgtctttccgcagttgcattgtgactgctggtggcagcaagtgcccttttggcaaacccgccatcaactaaggctgatgcgacagccactgtttccattgatgttgaacaggcgccaaacatacaaagaaatgggattttcaagtgtcttgccacatagttagccgtcacgttttggttcagcaagtcgcctgccagcaataggtcaatatcatcttttgtcagattgtttttttgaagcgcaacattaacagcgtcttccatcagctggcgttccgccatttcccagcttttttgattacaatgcatttcgtcataggttttatcaaataacgagccgagcggtccgtctttttcctttggtcctgctgccgttcccgctgagttgacaaatatgggatgttcaaatacccaggtttgctttcctgttaatttcattttcttctcctcctatgacatcagtttctcaaaagcaaaccgaatcattccaacgatgtatgcagctacaactccgaaaacaataacatttcctgccagtttaaacatatttgtcgctactccaagcactaatccttcacttttatattcaagagccgcgcttgccatactgttggcaaaacctgtgacaggtacggctgaacctgcgcctgcgaattgtccgattctgtcatagatgccgaaccctgtaagcagggcggaaattaatatcagcgttgcagctgttggattccccgcagttttttcattgaaatcaaaaaaatgaatataaaaattttgcagaccttgcccgattgcacaaatcagtccgcccactaaaaaggcttttacacagttccagacgtaaggcggcttaggctgatatgttttcacttttgatttgtaattttcttttatgtttgtcatcttgaaacctccttatgaatggtcaataaagtacagccaatgaaataaggatcccgcgattttcccaatcacgatggccattaacagaataatgattttacttctgagcccgattcgttttgccaaaatcggcaggacatttaaaacctctgtaagagcagccgctagcatcccgacgaacaaacctgccagaagcccgaccggcacagctatccattttgttagataaagatgattcatatgaagcgtctcccatcccccgcaaaccgcgccaagaataacagccgcttcataagcctgaacaaatctcattgttttggtgagctgcatcagccgcggaatgattcccattacggttaaaaaagcaacgaaacccgcccccaccgttatgcctccgccgagcccgacaaaaataatgaacaatacactaacgatcatgcagatcctttatggtttcttgattctcatgcatggccacatattgatcgagatcaagctgatagttaaacatctcaacctccagcgggctgggctcttcatttaggcgctttttaaatatgtggttaaaaaacacgatcatccccagtcccaaaccgatgctgtatgggatttgaagcaaatatggatagtcattcctctctccggttatgatttcatatagtgcgatatgaacatctctcatgcttacatcctcatgaaagttcatgatggcaagacacgatccaataaacagaagcagccagacaccgataaatagaaccgttgataaatttcgctttcgatattgaatttcaacaatggtttctgctccgcctacggtttgaacatcaagtgtcggatcttgtaaatgaatggctctgaggacttgtatgatatccagaattacgatatttttatctttttcgctcacctgataaagcggcatagccgaaagtttctttttcagctgaagctgcccttctatttgcgcggcatctccaacggtaataatatcccctggatgtgccagcacccggtggcgaagccggataaatattcgtcgttccatcattgatcaccatctttcggtggttatatatgtagtatgtggttcgattttgttctcattcatccgctcgaaaagaccataaattaccacgcttttgcacataaaaaagctagcctgcactgcagactagccatccgtatgatccatttgaaccttgatctgttttaatattttcttttcaagcctggaaacctgcacctgagagatcccgagccgctcagccacctcggactgtgtctggtctttataatatctgagatagacgattagtttttccctttcctccaaatcgctgattgcttctttcagcgcaattttgtcaaaccatttttcttctgagttgtcagcgatttgatcaagcagggtaatcggatctccgtcattttcataaacggtttcgtgaatcgaagatggagcccttaccgcctcttgggccagtacaacatcctcagcttcaatctccaaatggtcagcgatctcctgcaccgtcggcactctgcccagtgttttcgaaagctcatccttcgcgcgccggattttgtttccaagctcttttaatgatcgtgatacctttacagttccgtcatcacggataaatcgctggatttctccgataatcatcggcactgcatacgttgaaaaacgcacatcataggttaaatcaaatttgtcaacagattttaacagcccgatgcagccgatctggaagagatcgtcaggctcatatcctctgtttaaaaaccgctgtacgacagaccaaacaagacgcatgtttttttctatgaggaggtctcttgcctgctggtcgccattttggctttgtttgattaattcctttacttcatgatccttcagctgagcgtttttgccgtttttcttaacctccacatccataacaaatctccttaattacaaagcgctttgctttttgataagtgctttgttaagcgaatcgttgttcccatttcaggcgatgaatcgatactgacatcatccatgaaattttccataatggtaaagcccattccagagcgctcaagctcaggcttagtcgtaaatagaggctgacgggcttcttcaagatctgtaatgcctaagccttcatcacgaatagtcatatatacgacatgatcttccagcgtcactgaaatgtaaactttcccttcacagttctcttcatatccatggataattgcatttgtgactgcctctgacacgactgttttgatttcagtcagttcatccattgtcgggtccagctgagctataaatgaagcaactgtcacacgggcgaacgattcattctgactgagggcagaaaactcaaggtgcatttcatttttcatgatgccacccccagtgtcaggagcgcctgctgttcagattgttcaaatcggataattttaaacagacccgacatatcaaacaatcgcttcaccgcaggagagatagcgcaaacaaccatttctccgccaatttgcttaatttgcttgtatcttcctaaaataacgccaagccccgagctgtccataaaggaaaggtcctccaagttcagcacgatatggcgaatatcatccttctccaatgattgagtcactttttgcttcagggtttcagccgtatggtgatcgagttcgcctgttaatcgaatacaaagcacagattctttgacattcatgtcaattccaaggctcatgctcattcctccttgatatgatcggataatgagtgtttcgatttcgacggaatgaattccttcaccgtgacaaaactagtggtcattcggcataattacttaaattttgtccagtctcccatcgtccgctttaagaatgtgataaacccggctttcttcatatcttcttttgcagcaacaggactttcagcgagtacttctccatcctttttcagaacaagagtgccaagctcttggcctttttgaatcggagcactaatattgtccttcatcttgatttcttttttcacatcgttcatatcctcgccttttttcgtcaatattgaaatcggctcagatgtagtgagttcgatcaatttttgtttcccttttttgacctttacttttgctactgtttgatttcgtttatataaaggatgcgtttcatattgactaaaggcgaagtcaagcatttttgtcacttgcgcgtttctttctttaggcgtgctcgctccgaatacaaccgctatggcccgcatgtttccttttttagccgaagcagtcagacaatatttcgcttcgcctgtatagcctgtttttacgccgtctacaccaggataaaatttgataaggcgatttgtatttacaagccaaaactttttatctgtattttcacgcagataatcttcatacgtgccggtaaacttcgtaattgattcgtatttcaataattccttagccatgattgccatgtcataagcagagctgtagtgtccttcctcggtcagtcctgttgggtttttaaaggatgtatttttcaatcccagctcttttgcttttttgttcattttcttcacaaattcttcttcagagccggaaataaattcagccatggcgacggaagcgtcatttcccgaagcgattgcgatgcctttcagcatttctttgacagtcatttcttcgccgggctcaaggaatatctgtgagccgcccattgacgccgcatgctcgcttgtacggactttatcactcattttgattttgcctttatctaaagcttccataatcaaaagcatcgtcataattttcgtcatgcttgcaggcgccagtctctcattgctgttcttgttgtaaagcacttttcctgtgtcacgttctatcagcaccgcagacttcgcttcatgagcaagctccgatgtacgttttccgtcttgttttgcaaatgcagacggtgcaaatgtaagcagcattataccaatcaacaaagtggataaaagacgtttcatctcaaaagccctccatttcataatcctttttattttttccaagcgggatggttttatacgccactgatggaaaatgtttcgaattttgggcgtaaaaaaagacagctgtgtgatatcagacacagctgtcttttggtcctgcattgattcatttttattcgtactgagcgacgatcgctttaacaagctttaagaatccagcttttactttttcggtcacttccataacttcatcgtgacttaaaggctgatccagaattccggctgccgcgttagagatgcaggaaatgccaagaacccgcattcccgcatgattcgctacaatgacttccggaacagtagacatgccgactgcatcagagcccatcgttcttaagaaccggacttctgccggtgtttcgtaagaaggtcctgtcacagcagtgtacacgcctttttgaattgggatattaaggtctttcgcaatcttttcagccaggctggacagatctttgtcataggctgaagacatatctggaaatctggcgccgaaatctgcttcgtttggcccgattaacgggtttgttcccataaagttgatatgatcggtaataatcattaagtctcccgcacggaattcagtgttgacaccgcctgcggcatttgtcacgatcaacgcttccacaccgagcgctttcatcacgcgtacagggaatgtgactttctccattgagtagccttcataaaaatgaaagcggccctgcattgcaatgacggaaactccttcaagagtgccaagcacaagctgtccggcatgcccttcaacagtagataccgggaattcaggtatatcttcatatttcagcttgaccggattttcaatttcgtccgccaaaatgccaagacctgagcctaaaataaggccgatcttcggagattccggcaggttttgtttaataaaagcggctgcgcgttcaattctgtccttcaagaaacagtccccctattgtaataaagataaaaagcttttcccgtatttcggtttattcgtttggaaattatcagcgatcgttgcaccgatatcagcaaatgtatctgcaagcggcagcatttgcgctttcttatgttttttgctgtaagcgagaatcggcacatactcgcgtgtatggtcagtcccatgatgaatcggatcattgccgtggtcggctgtaataattaacagatcgtcttctctcattttttcaaacacttccggaagccgcgcatcaaattcttcaagcgcgcgtccgtagccttcagggtcacggcggtgtccgaataacgcgtcaaaatcaacaaggttcgcaaagctcagacccgtaaagtcttctcccagcgtatcgatcaccttgtccattccgtccatattagaaaccgttctgcgtgaagaagtaatgccttctccgtcgtaaatatcagagatttttccgattgaaatcacatctaagccgctgtctttcaattcattcatgacagtgcgatcaaacggcttcagcgcataatcatggcggtttggcgtccgtttgaattgacccggctctccgacgaacggccgtgcaataatgcggccaaccatatatttcggatcaagcgtcagttctctcgccgtttcgcaaatgcgatacagctcctcaagcggcacaacctcttcgtgagcggcaatttgcagaacagagtcagcagacgtgtaaacaattaaagcccctgtctccatgtgctcctggccaagctcatccaaaatcgctgtgccggaagccggcttgtttccaataattttgcggccagatctcttttccagctcttgaagcaattcatcaggaaagccttccgggaacactttaaacggtttatcaatgtataaacccataatctcccaatggccggtcatcgtatctttgccgtttgacgcttcttgcatttttccataataggcaagcggatgttctgttttttctacacctttgatatcttcgataagaccaaggccgagctttgccatattcggcatatgtaatccgttcatatgctcggcaatatgaccgagcgtatgagcgccttcgtcattaaagtcagcggcatccggcgcttcgccgattccgactgagtccatcacaattaaaaacacacgattatatttgtatgcaggcatcttgaaagcctcctttttttctatacgtctattgtatcgctaagaggtctgacaactcaagtataaaccgttttcattcccgttgacaatgtatttggaaataatgagaaacttcaatattttctgtcgctctaaacaaaaaagccgcagccacctgcggctatgctcgcggatgaaactgcttgtacacatccttcagccttgttttcgtcacatgcgtataaatttgcgtcgtggatatatccgcatgcccgagcatttcctgcaccgctcttaaatctgccccgttctcaagcagatgcgtcgcaaaggaatgcctgagcgtatgcggagtcagctctttcttaatgccggcttccaacgcgatttttttcaggttcttccaaaatccctggcggctgatctgtttgccgtgatgatttaaaaagagggcgtcagacacattgttctttaacagttttcccctggcttttgtcatatattcctcaatggcggaagcggcggcttcaccaattggcacaatccgttcttttcttcctttgccaaagcatcggataaaccccatagataaatgaacatctgccgttttcaactcaatcatttcactgactcgtatgcctgtcgcataaagcagctccagcattgctttatcccgatagccgaatgggctcgtcagcttaggcgtgtccaataaccgctcgacttcattgagtgcgagcaccttcggaagcgcccgttccgtcttttgtgtttcgatatgaacggaagggtccttatccgttactttttccctgagcagaaattgatgaaaagagcgaatggatgccaaatgccgcgccgatgtcttaccggatttccccgagtccttcaaatactttaagtattggataatatgtatgcgggtaacgtggttccaatccgtcacatgaagggtttctgttaagtagagagaatagcttttcaagtcacgttcataggatacgatcgtattttgagagagccctctctctaccatgacgtagtggatgaaatcctttatttgatctttcactcttgatctactccccgttttggtaaaaaaagatcaaccggtcgagccatccgcctttttcatcctgatccatttcaacaacttttacagcggagccttccggtttatcataccgatgatagttttcatactcttgattcacccatatcatagcataatagaacaaagcggtaaaaccggtaaacaggatgaaaactttcaatgcatcgacagctgttttcaggaatcttcccatgtcctaatcgatcctttcctatggttccagttatataaaccatatgccaaatcagaaaggttttatacatagaaacagcaaaaaaccctttccccatgagaaaaggttcgcgctcggcaccatctattcagtttcttttccattacagcggtggcaaatgccgtgaaacgtcaatctatgatctttaatcttaaatttccaatcacgttcaatgatttcttccacgtcttcaagcaaatcttcttcaatttcatcaacggctccgcactccatgcacaccaagtggtgatgaaagtgagctgcgccctctttccgaaggtcgtaacgggacacgccgtctccaaagttaattttatctacgacttttaattcagttaataattcaagcgtacggtatactgtagcgagaccgatctcaggagatttctcttttacgaggaggtatacatcttctgcgcttaaatggtcttcttcgttttcaagcagcactcttactgtcgcttcacgctgtggcgtaagtttatagctggatgagtgcagttgtttcttaattcgatcaatacggttttccatgtctttccctcctacgccgcattccatgactcattataacaaaatacgcgcagagttccaactataattattataaactgataaataaaacggttttcttttaataataattttaaaaaagtctagatgtaagcttttccattaaaacaggagataagtatgcttcaaacagagatgagatcagcgctaaaaacagaatgaccagcagcacaaaggcataccgcccgaaccattgaatcggcgcgtcatgcaggcttcgtttcacgaacagctgtctgattaactttaaagaaaacgcaattgcacatgtgcccataatgagataagccggaatcagcagcacattttgcggcaaaacggcgacaaatgataggaaaaacccgcttactcccatctgattgactaggaacccgacagtaaagccgacgacgatccctttcagaaagatcataatgaaaataatcggcatcccaatgacggaaattccgagtatccacatcaggcctaaatactttgcattatgaaagatactttgcccaaacatatcagctgaacttgcctgttttccatccgaaagctgtccaaaaaattgacttaagtagtagtataaatcttctttctggctgatggtcatactgttgacaataatcgcgccaaagatgacacccatgaaaaacagcactgacacaaatatataaagagagagatgatctttgacatgcctgagaaacatgtccttataagagatttttcgcataccgtttcctcccgcccgttctagtgatttgatttaatagattgtatgaaagaaacggaaaaacatgccctttttcaaaaagaaacgatagagatgaatgctaggcggctttttggggcacaaaaaaatccttatcatcaactgctgtatgatcataaggattcttatgcttccgtttattcaaaatctcttttttgctttttgtcattctttcatgtgtgctgaaagatggtgtgctgcctcttgataataagacgtcacgtccgccgtttctcaatcgatgcccccgcttctttttcgcttggctttttgccatgtgatcactcccttttttattttcatagtaatgataacaaaattgaacaatgataagaaaaaaacagcacctgctacgacaggtgctgtttagctacatttatttcactgctgtaagagctgcatgctcgacagctgctgctaccgcatgatggacttttgaatcaagcggctgagggacaacatcaccttgtttagtgcaagctgcgatggcctctgctgctgcgacaagcatatcatgattaatctccgtgctttttgcgttaagcgctcctctaaaaatccccggaaaaccgagtacattattaacagaacgcccgtcagctgcatatgcggcgccagcctgcagcgcggcctccggttcaatttccggcttcggattcgataaagccaaaatcacttgaccagaacgtacaaatgccggttttattaaacccggaacgcccgttgtagcaatgacaatatcacatgtttccatgagctcctcaatactggaaactgcctgtccgccgtattgttcgagacgattcattgctgactctgatttgtctgttccgtacacagcattcacaccataagccatgaacatccggcagatggccacgcctgctgcgccaaggccgatttgccccactttcgcttccttcaggtcaacccccgcactcctgcatgccgaaatggcagctgccagcgtcactacagctgtaccatgctggtcatcgtgcataacagggatgttcagctcctcttttaggcgatcctcgatttcaaaacaatgcggcgaaccgatatcctcaagaaggatgccgctaaagcccggagaaatatgttttactgttttgatgatttcttcaggatcactcgtatcaagcagtatcggaatgccgctaatacccgccagctgatcaaacaaagcagcctttccttccatgacaggcatgccagccacagagccgatattcccaaggcctaaaattgcggttccatccgttacaattgcaacagaattgctgatcgttgtataaatagaagctttttcaggttctttttcgatcagtcggcacacgtccgcaacacctggtgtgtagacacgtcccagctctgccagtgaacggatcggcattttgcttttcatttggatttttccgccttcatgtgcggacaggacttcatcagatacggtgtgaagcctgatcccttctccgagggcctgtacagccgcgatcacttcctgaagctgttcttcattctccacttgaacggtaatattccgcattgtgtaattgggtccgacttttaccgtctccacttcaccaatatccccgcccagaaggccgatggccgtagccacccttccaagatttccgggaaccgaaggcgtttcgatcatcagtgtccgaatcatgtgtttcgctatcattcagtgatcctcccctattagcctagtttttcggctttaactgtattgtttttcgtataccatataaattttcctgtataaccatagataattgcaagacctattgctacaaaactgagccacataaacggcagataagagaaggtagaaacacctaaaataccagccatgtaaatcccattatcagaccaaggaaccatccccgaagtcaatgttcccccgacctctgagttacgtgataacactcttctgtccagatgtaagcgatcatagctgtcttccataattttcggagtcaaaataagagatacatacatcgcacagccgaagatgtttgctaaaaacgctacgatcagtgtagacaatgtgacattgccggctgaagttaatttcttttcaaacgttgaaacaatgacttttaacacgccgagtttctcaagcagaccgccaaaaccaaggccaaagatgatgacgacgagagaatcaagcataccgacaattccaccgcggtttaacaagccgttcaaaaattcaacatccgttttaatagagaagccgttgtacgcagttgcaatcgcatgggcaatatccattccttggaaaacaacagcccagattgcaccgagtaaagcgccaattacgataaccggcatagatggctttttcatcgccaataagactatgacgagaactgccgggatcagcatccaaatatgaatgtcaaacgtgttttgcaaagatgattttaagaattcaactttatcaagatcaatatttttcccgccgtacataaatccaacaactgtaaagagtatagctgtaatgacataagcaggtattgataaataaagcattgctctcacgtgagccaatacatcgacttttgatagtgaagaagctagaactgtactgtcagacagcggagacagcttgtccccaaaataagcacctgaaagaatagctcccgctactagaggaagcggaatgcctaacccctctccaattgcgatcatggcaatgccggcagttccgactgttccccatgacgttcctgttgccacagacataatggaacaaataattaacgttgccagtaaaaagatacttgggtgaataaattccagtccgtaataaatcaaagtcggcacaacgcctccggcaatccatgttccgatgagcgccccaactgaaacgagaatcagtacggcttcaaggccatttgatatcccatgtacaatcgcattttgtaaatctttataagaataaccgagtctaatacctaaaagcattgcaataaaccatgaaacaaaaagcgccagctgtatcggcaagtcgagaaagactgtaaacgatagaacaagtgctaaaaatactcctagtacaataataatttcaaatagtgttggcaatcttacatccttcaaaagaagtcccccttcatgtaaaagctaaaacgctttcaatatatagtgcaacacgtatactatacttcctcatccctatgttgtaaacagcttattcatccgactattcggagatgaataagctgtattttatacaaattttatttttctaatagttctttccctgcgatacctggtttggtcatctcatatgggtttaaaataatatccaattcttcttctgtcagcacatcatgctgcaggcaaaggtcacggactgattggcctgtcataatcgcttccctggcaattctggcagccgcttcatatccaagatgcggattgacagctgtgatcacgcctgcgcttttttctacgtattgcttcaaccgcttttcgttggcttcaatgccttttaagcagttgtcagtgaacgaacggaagccgttgttcatgatgctgatggattgaagcaaattaaagacaagcacgggctccatgacgttcaactcaagctggccggcttctgaagcaaggcagattgtattgtcgtttccgataacctggaacgcaatttggttgatcagctccgccataactggattgactttccccggcataatagatgaacccggctgacgtgcaggcagagaaatttccgcaagtccggcgcgcggtcccgacgccattaagcgcaggtcgtttgcgatcttcgacatgttcatcatgcagacttttaatgaagctgatacctctgtataggcatctgtattttgtgttgcatcaacaagatggtcagcgccgacaagaggaagcccgctaatatcagcaaggtgctttactacctgtttgatatattcaggatcagcgttcagccctgtaccaacagcagttgcgcccatgttgacttcatacaggtgctggcgcgattgcttgattcgtttgatatcacgctcgagaacacggctgtaagcttcgaattcctggccaagacggatcggaaccgcatcttgaaggtgtgtccggcccattttaataacagagtcaaactcctgtgctttttgcttaaacacactatgcatatcttccattgttttcagcagtttttccaagagcttcaatgtggaaatatgaatagcagtcgggaacacatcgttcgtagactgtgacatgttcacatgtgtgtttggacttaaatggatataatctccctttttatggcccatgatttcaagcgcccggtttccgataacctcattcgcgttcatgttcatagaagttccggcaccgccctgaatcggatcgacgataaactgatcgtgccacttgccttccagaatctcgtcagcggcttgtacgatagcttggccaattccttcatacagccgtttcacgtccatgttggcaagagccgcagcttttttcacaatcgccagtgcgttaatcatttcctcatggattttgtatcctgtgatcgggaaattttcagaagcacggagcgtctgaattccgtaataaacatctgcctcaatttgtttttctccaaggaagtctttttccacgcgatattctttttggccgtttaacataatctttaaccttctttctctttgctggttatcgtttttacattttacaggacaacgtcatcagcaatcggtgtttccataattctcttgacgacaggaagatccgaagactgacctagtgcccacatcaattttggcacaattgcttctgtgttcatatttcttgatcggataattaagtcttggttgaccctgcggccaacttcgtaaatgctcatgtcttcgccttcttcaagacattgagtcgtaatgacgacgacaatgccgctttcgatcagttcattcacttttgacaaaatgtctctgccttcaaacggcacccctccgctgccataactctcaatgacaatccctttgtacatgcttttcagggcatcaaacatttcaggctttaagcctggatgcagcttcagcagacatacatctgtgcatagtgaagtgtcaactgtgaaggtgtcgttctcaggttccgttacttgtttgttgtattcgatcccgtcttcattgataaaagcgatatatgggtaattgatgctttcaaatgcgtcgtagcttttcgttcttaatttgatcgcacgcgttccctgaatgactctgccgtcaaacacaacataaacgccgcccacgccttcacaggcaaatcgaatggcatctgtaatattttttttggcatcggttttttggaacgtgatcggaatctgcgagccggtgatgacaatcggctttttggcatgctgcagcatatacgatagtgcggcagatgtataggccattgtatctgtaccgtgagtaataacaaacccgtcataggcatcataattttccttaacggcttctgctatttccacccagtattcaggctgcatattggtgctgtctatattcataagcgactgagtttccattgtgtaatcgttatcaagttttgatacgtaacttaataattcatcagccttgactccgggagccagcccattttccccttcaactgaagcaatcgttcccccagttgtcaacatcaataattttttcataccatgcacctcttcactgtatctaaagatgggttgcgagaaggtattcgcttttcgcatacttttaatgcaattatagacacggaaaataaaatacgcaagacattattattcaattcgcgtacacttcctaatacctatatgatataatcagctcaaggtgaaaaaggagcggaagttcatgaatctagatcgtttaactgaattgagaaaaaagaaaaattggtcgcttcaatatacagctgaccttctcggtatcgcaaaaagcacatatgccggctacgagtcaggctaccgacggccttcacttgaagcgcttgccatgctggctgacctctttgacacaacctgcgatgaacttttaggccgcgagaaacaaaagcagactgctcctcaggccatagaattggccacgtggagcagccttgactttaccatttctgttgatggccagccgctgagtgaagatgaaatcatccagctgattacctttatacgcacaaaaagaaaagtacaggaggaactgagttaatctttagctcacggtttaattttaccgtaggttcctcctcctccggctttcaattccagttttccggatctcgcttttacgataagcgccgcagttttcggcgggacaatgcgagccaaatcttcttctgcagcctcatgaagaacagccatttctgttccgaaggctttttttagtttgtccagcgttttcgggcctacacccggaacaaattgcagcgggatctgatgtacatatcgcggacgcgggacgcgaacttcaagctgatcactcaattcacgcaatctttcgctgactcccttggtaaatctggcatttccgcaattcgcgcacgctgtttccccgcttacagcaggctctccgcacgcttcgcaagcggtctgataatatttccccaataacgggtccaagccataatttgcgataattttcctgtcatcttgtccctttaatgcaagagcaaattcagtaaaatcagctgactgcacatatagttcattatattctctgccgattttccccaacgaatgcgcatcagaatttgttaaaaaaggatacggattcaattcagatacctgtgatgccatgtctgtatcacagcttaatccaagctccaccgcgtctatcatagatggatcaaaaacctcagttaagcttgatttaaccccttttccatataagcttttatgcggcgtaaagatatgggcggggataaacaagccgcccatatcctgcacttttttttgcaggtttaagcccgtttcataaatccgctgcgagcttaaatgaatatttttcagccgggctgacagccagtttgaaaactgtttcatatcagccagcgtcggcataaatacgagcacatggatcggtccgctacaggcttcatcataaatctccagctcgctccccaataaaagagtcgtgctgcgataacggattcctcccccgtcaagctcgcgatattttccagatgaaatgccttcctcaagctctagaatgacttccggagaatgacagtcgataatgccgaggagttcaattcctttatgttcactggcttcaaccaaaattctgtccagtgttaatgttttagcgcctgttattttgacagcccttcctgtaaaggtccggccgatatgaatgtgcaaatccgcgtaaatctttttcatttttgtgcttggagcgcttctttcagctgaagatactgaatcgcgtaggctgttttagcatcgtatacttcacgcgattcaaccagctttagcgcatcttcaagcgtcacctccatcacttcaacaaactcgtcctcatcaagctcccgtttttcttcaagcacagaaagctcctcagcaagaaaaacgtgaacgatttcatctgcaaatccgggtgatgtataaaacgcagttatttttgtcagtttttttgctgtataaccggtttcctcttcaagttcccgaagtgccgtatactccggctcctcacctttttcaagcttaccggccggaatttcaacgatcgtccgctcaagcggcttacggaattgtttgaccaggatgattttcccttcatctgtgacggctagtaccgctactgctccagggtgtttcacaatttcacgtttactggctttgccgtttggcagctctacatcctcgacataaagatcaatgactttacccgaaaagatctgttctttggcaattgttttttcttctaatgatttcatttcttcatctcccgttctgtctctatatgatgccccatacattttatcatactagagcaaaagggggcttcttcgtgaaagtgcaccgcatgccaaaaggtgttgtcttagtcggaaaagcatgggaaattcgggcgaagttaaaagagtatggacgcacatttcaatatgttaaagattggatctcaaagccataaaagttgaaactttagctcctttatattacggtcaatacaaagcctaaaaaaggagtgtgcacatgagaaagcgcaaattgggtacatctgatttagacattagtgaagtcggactcggctgtatgtctcttggaactgaaaaaaacaaagcattgtccattctggatgaagcgatcgagctcggcatcaactatttggacacagcggatttgtatgaccggggacgcaacgaagaaatggtcggtgatgcgatccaaaacagacgccaggatattattctggcaacaaaagcgggaaaccgttgggatgacggaagcgagggctggtattgggacccttcaaaagcttacataaaagaggcggtaaaaaagagccttacacgtctgaaaacagattatatcgacctttatcagcttcacggcggcacgatagaggacaacattgatgaaacgatcgaagcgtttgaggaattaaaacaagaaggtgtcatccgctactacggcatttcttccatccgcccgaatgtgattaaagaatatgtaaaaaaatcaaacatcgtcagcattatgatgcaattcagcctgtttgacagacgccctgaggaatggctcccgcttttagaggaacatcaaatcagcgtagtcgccagaggtcctgttgccaaagggctcttaactgaaaaaccgcttgatcaagcttcagacagtatgaaacaaaacgggtacttgtcctattcattcgaggaactgacaaatgcccgcaaggcaatggaggaagtggctcccgatctttccatgacagaaaagtcgctgcagtatctgctagcacagccggctgtcgcttcagtgattacaggcgccagtaagattgagcagttacgggaaaatattcaggcagcaaatgcacggcgtttaaccgaggaggaaatcaaagcgctccaatctcatacgaaacaagacatttacaaagctcatcgctcatagcagaaaaaccagcacccgtacaggtgctggtttatttatattgatgccaatccatttggctttcatttaggagttcttcaaagctcttatttttttcgatctcttttttctttctgatctgttctgctttttctctttcctgcctcttttcatcctcttccttcaattggctcttcatctccataagctttgctttgatatcggattgaaggccgtcttttagctggtgtttgtcagcaagatttttgttttttcattcagacttcccccatgttttgttttgaagacagtttatcacggagcatatacactgaacaagccgactctcttctgatcactttctcagcggagcagtgtttaggtataatgatttcaaacacgaattgcctatatatttagttgaaaggtgctgtgacttttgaagaaaatccttttggccattggcgctctcgtaacagctgtcatcgcaatcggaattgttttttcaaatatgattctattcatcaagaaaaaaacggatgaagacattatcaaaagagagacagacaacggacatgatgtgtttgaatcatttgagcaaatggagaaaaccgcttttgtgataccctccgcttacgggtacgacataaaaggataccatgtcgcaccgcatgacacaccaaataccatcatcatctgccacggggtgacgatgaatgtactgaattctcttaagtatatgcatttatttcttggtctcggctggaatgtgctcatttatgaccatcgccggcatggccaaagcggcggaaagacgaccagctacgggttttacgaaaaggatgatctcaataaggttgtcagctggctcaaaaacaaaacaaatcatcgcggattgatcggaattcatggtgagtcgatgggggctgtgaccgccctgctttatgctggtgcacactgcagcgatggcgctgatttttatattgccgattgtccgttcacatgttttgatgaacagcttgcctaccggctgagagcggaatacaggctcccgtcttggcccctgcttcctatcgccgacttctttttgaagctgaggggaggctatcgcgcacgtgaagtatctccgcttgctgtcattgataaaattgaaaagccggtcctctttattcacagtaaggatgatgactacattcctgtttcttcaaccgagcggctttatgaaaagaaacgcgggccgaaagcgctgtacattgccgagaacggtgaacacgccatgtcatataccaaaaatcgggatacgtaccgaaaaacagtgcaggagtttttagacaacatgaatgattcaacagaataaaaaagcgaaaggcctattcggctcttccgcttttttatgttacagaacgtcggtaatgccatccatattttctctgatccattcaatcgcaagatctatcgttgtaaactcctgcgtctcaaaggtcatttcatcctgcaatagccagacatctttcttgatggactctgctcctccgattgaccagtgaagcaaggtatagggatggttttgattcaggaaggatacccacgttttattttgtgctgtgttcttcattgccttcagcttttgttccacgtttcgcgtctcctactttactaatatgctcattctggggctgagcatttcagccgggcttttcagcgccaatgttttggctttttcattgtaatcgatcgtcatttgatcgtcaaaaaacactttttgtgacgattggatatacagcggaatgccgttcgtttccagctgctcgcactgtcccgttaattcttctgccagccagattgtggggacaccgcttaccgcgcagccgcatccttctgcatcgtaacgaagctgggctttttttcccgggttggcgtcaaacgcctgctgcagtgcctgttttgctgcatctgtcacatgtatgttcataaggtgaaacccccgttttcatcattttcgctattgtagcatacaacactgccattcgcattgtttctgccttttttccaccgcttcgcattttcttctgcagtcttgatccactcatctttcccttttatgtactgattgatgctgtcaggatgctgggccgccagccgttttttgagaacggcgtattctttcgctatgtttggatgagctctgagataatctctgaataacagatgcctttcaatagcagggtttccctgttcgtacatatggacatgatgagtgcgtttatttccgcccttttggaaataacgcctgcccgctatgccgttctcaccttttggtgtatagccgttagccttcatttgttcatcaaattggctcacggcttcaatgcttctgacttcaattaacatatcaatgattggcttcgctgccatgttcggtatcgatgtgcttccgatgtgatgaacagcgataatctccggcccgaacacaagtttcagcagttctttttcttcatcgaaacattctgcccatttttcgttgtagagaatgacctcaacttttcttttcggatacaaatgaaagaccgacagcaatagaccctgcgctgctttgacggtttctgccttttggaatccggcctgtgtatagagtgacacggccggggtattgttctcggctgtgactacttcgattttctcagcgtcttcattatgatcaatgacaaattgcagaagtgctcgtccaattccttttctgaaaccgtcaggatgcacaacaagcctgcaaatggtgagatgatgcatgtttttctcatatgaaatgacaccgatcagcttgccgtttttccgatatcccgcaaaccgttcatgggatgcttgaatatccttcaccttctcttgtaaagcgggaataccgtcaaaaccgataatctctgtttcctttatgtaggcggggatctgtacggctaaaatctcacgcgctatcgtgtcttccttatgctggagaaattcaatcattcgtgttcctcctgaaacagccgctgtctttcgacttttgcgacgcggactgcatacgactcgtaccaaaggctttttcctttttcttttgccgcttgatgttcagtgtgatgcttccaatggttaattgcgtccatactgtcccaataggaaactgtgatgccccttccatccgcttcacgtacgctttccacgcctaaaaatccaggctgatccgccgcaagtgataccatccgctccgctgtttctccatatcctgtgtcattttcgcttttgacagaagaaaaaatgactgcatagtaaggaggctcaggtgtttttgataaaaaatccatcatatttccccctcatatgtttttgacaaacagtaccctgtcttgacccggaccatcatagtttgcaaacactgagatgccatttaccgtcttggtgcccttttcaatatcaaaccccaattttgtgtgatatgcgattgataccttattcacaggtgaggtgacgcactttacccgggtgcagcctctttgttttactgtttcgataaatacatcatacaattgtttacctatttgcatttttctgaaatctggatgcacaccggaaaaatgaatgtacgccgtttcaggatccgattgcgattgaaatccgattaaaaatcccgtcatgctgttatgttcggatgtaataaagcttgtgtcctgaaaatgctcaaaaaatagtctcggcaatttttctttcagctgtctgccgccccaccattcattcagtacagacgttaccatttcataatctgaagacgtgattgttcgaatatccattacgatttgatctccctccgtctggcaaaacgaatgtcagctctttttctcacaatataaaaattatattttgcctggctggaattgtaaatgccttctttcctgtatcatacgtttccagactgccgagggaacaatgtttgatcattttacgcctatttctcccccaaacaggaggagagactttacagcacaatatcaagcacttgatcaagtttcagcttataaagctgatcctcgtctccttttatccatactgctttttcaaactcttcataccggcagattttcccggtgcagcagacaatctcaccgtcctgaaagcagctgacagtgatatcctgagcaaactccatcgcggtgcaaagcgtttgattcatctcttccagcttatcggggtcaaggatcggcttttgcagcttctgtttaagtcgctttctctccagcaggctttgcttatgttccggcagaaacatcctgctcccttcccacagcaggttgcccctttttaaatgatcgttcatttataatgcccccctattttagccgcacgttcaaatgcctggcctgccgctgtcagtgacgccgccctgatgattgctgtgtcgccgaatcgatttttaatgccgtccatcacatagcctaggctcattttctttgcataatcctgaaataaattgagctgccatatgtcatcagatgagagctgagacagattgacaccgagacggcggacaggtttcccgtcccaaaatgtaagaaacagccggcgtacagcctcatatacatcctgcgtagaattagtcggctctgccagcttcacttgccggttgaagcccgtcggccaatcaaaatcagcaccccggcagctcactgacaccgtctgccccatgaccccggcgtttcggcttcgcctgcacacttcttcactcagctcaagcaatacgaccttgatttctttgtcaaagtgttcgtagtctctcgggagagtcattccatggcctatcgccttttgcccgtccagagacgaagttgacacaggggaatagtcgattccgtttgccgtcatccacagcacgtggccgttaatgccccatttcttttttaaaagatcgagcggaaaagccgcgagcccgccgatcgtgctgatgcccattcgatttaaatgatgcttcatgcggctcccgacgccaaacatgctgcccaccgggagcggccacatttcggttttcatattttctttcgttaaggtaaaaataccgttcgtattctttttggcaaaattgtcacacgcaattttggccagcgctttgttagggccgattccgacccgtgcataaacgccgatctcccgcatgattctgccctgaatgcttttcgcgatctccatcggcgtcccaaacagcttctggctgcctgtaatgtccatgaactgttcatcgatagaataaggctccacaaggtctgtatactcctcgagaatggccgtaatttgcagtgatacatcaatataccgctgcatacgcggccggagcacaacagcctcaggacacttttcctgcgcctcccacagccgtgaagcattcaccacacccttttgtttcgccagcgggcaggcagccaatacgactccgccccttttttcagggtcacccgaaacaatgacgggcttatttttcaaatatggattttccgctttctctacagatgcataaaacgattgcatgtcaacgagaaaaatcactttttctttcatcatacacacctctaaaaagaacttatgttcgtttttcattatatgcgaaagtatgttcgttttatactggtaaatgattcttgtctgacagaaaatatgatccaagggtttgagagaagaaaaacatttagtagaataaaagcgaacataaggataggagagtcatgatggagaaatttgtcgaaaaaatgatggaacaggcattgcgtcaatacggcagaaacgttgctatagatccgttaagcccgtatgaaaaacaaagcctgaaagcggctctacaagagagacggaatgaagaaccagatgaggatttgcatgcgcatatagaagatatcatttatgactatgtcacaaaccaaggtctgttctcttaaacgcatgactgtcagttctttcagccgctgatgcggcttccctttgaaaacaccgcctgaaacaaataaacagtctcaggcttacagaaaaaagcaggattttctcacgctccatagattcatatggcctggcgtaaaattccccctcagaactcgcgcaaaacggaataagctgtccatgatcacgcgtatacactttttcgaagagatgtgctctcttgttctgtcatgcggtccatcggttttcagcttacatcttgatctcatagccggtttcactgccgatatgatctacgtcctggcggcttaaactaacacaccctcactgaccaatcgctttgcttttcatcggacatcccgtcatttttcttcttcaatttcaagatgtaaactccgtcagccacacgcatcctcaacgcatagtatattgccatccatacaatcaggcatactacatgtcaaaaacgaaatattttgaatgatctattggagaaggaaattttttcatatatgatagaggaagatcttacatacaggagagaatataattcatgaagaaatggaaagatatccacccgatcagctggacaattataatcggaaccattttcggcagaatggcaacatcgatgagcattccttttttagcgatttatttgacagccgtccaaggcgcatcagcttcctatgcagggctggtcatcgccgcgagctcatcagtcggcatcctcgcaagcttttacggcggatatatctcagataaattcggcagaaaaaacatgatgcttgtatcgattttcggatggatgctggtatttgcaggctttgcggcggcatctcatctctgggtgttttttgtagttaacgcattaaacggtctttgcaaatcactgtttgagcccgcttcaaaggccttgctgtctgatatgacagaagaaaaaacgagactgctagtttttaatttacgctatgcagctattaatatcggcgttgtcttcggacctgtgcttggcctatatttcggctcatcgcaatcgactacgccctttttggtgcctgcagtcatttacggactatacggaattgtgcttgccctccaatttaaaaaacatccatccttatcagcaccagcccagtcccgaaatatgagcgtgcgggaagcgtttatggtcacgcaaaaggattatctttttaccattgctttggtcggcattacgctatgcaccttcggctactcacaattcagttccacattccctcagtatatggcgcagaaccccttgatcggcaatggaacgaagctgtatgggctgatgctgacattaaacgcaatcgttgtgttggcgacgcaatttcccattgtccattttgcaaaacggttttcgccgctttgttctctgatgctcggtaatgtgatggttagcatcagcatggccattttcaccgtatcgcacggtgttccatcaattgtgatgattgtcatcacatttacaatcggcgaagtgcttttattctctatgatggatttgtatgtagaccagattgcaaaaacagggttaaaaggcacttatttcggggcaatcggtttttcacagctcggaaacgtcatcggcccttgggtcggggggatatgtatagacctgtttggcgctggccgtccgatttatattttttctgtcctgagcggcattaccctgctcggcctgccatttttagcgttcgcctatcggcagatgaaaacggagactacaaaacaccgttcccgtctggaaaagccgctttaaataaaaaaacgggagagaatcaatctctcccgcaacaatgaggtgatgaacatgaatataggcgatatgatgtttcagctgtttgtatttattatatttgccgctgttatctttgcggctgttacaggcttcaagtatgcgaaaaaccgaaaagcgcagctggatcgcattgagaaaaagctgaacagcctgtccgaagatcacgattaacagcttggggcaacgagctctaccttaatccgatccggatcctcacaatagactgcataatgcccgtctcctccggcaaaaggatgcctgtctcggtacaacacacgatagccttttgccgtcaatttttcggtcatctgatcgacttgatgcttggattcagcataaaatgcgagatggttcagaccgactcggcatctatggtattccggctctagaaatggctctttcgcctgcacaatcactaggtaaaaacgatctttcttccagctgatgcctgagctccatttttgatactctttatagccaagttcttttaagaaccagccccaaaaccgcctagacgcctccaaatcagagacatacagttcgatatgatgcacaatttcataccctccttaccagcacttcctcgaccttatgcccgtctcccttacgcaaaatgagatctgacctgaatttagtcggcaaaatattttcatataaattcggccggttgacactctcccaaatcgaggctgccatctcgtcagcctcctgatcggacaagtctttaaatttatgaaaatatgaatcaggattttgaaaagcagtttcccgaagcaggcgaaaacgctctaaataccaagtgaaaatccggctttcctccgcatccacataaatcgaaaaatcaaagaaatcggaaacaaaaatacgcgggttttcccggtcatcctccaaggtgggcgactgaagcacattaatgccttcaataatcacaatatccgcctgttctacaacctcgaacacaccttcctcgcggtcataggttagatgggaatacaccggggcctttacgctgtcctttcctgattttaagtcattcaaaaattcgagcagcgcctttacatcatagctttcaggaaacccttttctagacatcatatttttctttttcagctcggcagtaggaaataaaaaaccatctgtcgtgataaggctcacttttggacggtcaggcaaacgcgaaagcagcttctgcaagatccgcgccgtcgtgctttttccgactgcgacactgccggcaatgccgataataaacggaattttggctgaatgtggatgcttcaaaaaaacattgacatgcttattgcgttcagccgcagacttgacatgtaaatgaagcaagcgaacaagcggaatatagatcgtttccacttcttcaacagatagataatcattcaatccttccacagcttttgcctcttcttcagatacagcaatcgacaaatgccccccaaaaccagaccaagactcccgattgtgctgtgtatataaagtatgtaggttaagttctttatttttcactgtttacacctgactctctgtaggttaaaacccttacaaagattgtaacggaaaaccttttcactgtctgcttatttttcatttcgtttttttagcaaatcagcaccaattcggttatacgcagccatttcatcttttggaaccatgcttcctcccgttccccagacgacatgtacagcatgttccatcttatatttttgaccatagcgccttccctcttctgtcgaaaaaagctgaaccggcccgaacatgcccgcaagagcagagggctctaaatatttatcttcagatacagccagcatatgaagcaaagtataaagcgtattgtcctctaccgtataacagccgctcagaagcggttcaatcagcttgccgacaaatcctgacggcctccctacggcaagtccgtcagcagcagtctgattatccaggccgatatcctggacggagatcttttcgtgaagtcctgaataaagccctaacagcatacaaggtgaatgagttggttctgcgaaaaacacatgaacatcatctccgtataaaagcttcagcccaaatgctacaccgcccggtcctccgccgactccgcacggcagatacacaaacaagggcgtctcaagacttggctttatattcatacagtcaagctgcgtttttaatcggcttgcagcaacagcatatcctaagaacagctgtcgagaatgttcatcatcaataaaataacagaatggatcatgttccgcctgccgtctcccttcgttcaccgcttcgctgtaatctgtttcgtactccataacagtgactcccttttgacggaggagatcctttttccactgcttagcatcggcggacatatgcactgtcacgcgaaagccgagtgccgcgccgatgatgccgatgcttaaacctagatttcctgtcgaaccgacagcaatcgaatagcgggagaaaaacccggtaaaccgctcttcctgtaagatgcggtaatcatcggtttcctgaagcattccttcttgaagcgcgagattttcagcatgctttaacacttcataaatcccgcccctcgctttaatcgatcctgaaatcggaagctcatggtcgcactttaaaagccatcttccgggaaatggctgctgatatgccgcttccagctttcccttcatatgctgcacctcaaaaagcggagactcgatgattcctttagcgcctttcgtctcaggaaacacctcggcaatgtaaggtgcaaaccgctgcattcttttttccgcttccgctatctcggttgcccactcatctgcacggggtaatggcccctctttcttgcctgaatttgcccagaatacaggctctgcatcaatcagtttctgaataaacggatctttaagcagagcatgaaggacttctgaatgaactgacattcaacaatctctcccttccactatcaaaaactgccccgtgagaaacaagccactccaccacaggcagttctatcattattttttcatgagcgcgcgtcctgccagcttttctacaagagctggaaacagctgatacagcttagtgccggcattcattaaacgcggaagattgatctcccgctttttcgtaaaaattgcagctgtaatttgagctgccacgtcatcaggatcaagcatccagcggccgacatttttggcgtagtccccgcctttatcagcaatggaaaaaaagtccgtctgaatcgggcccgggttgactgttgtcacataaatgccggttcccgaaagctccatccgcaaagcgtttgagtaacctaacacggcatgtttggtcgcggaatacaggctagacttcggtgttgcgattttccccgcttgagaggcgatattgatgatatgtccctttttttgctcaagcatctgcggaagcaccgcttttgtacaggcgatcaggccgaagacattcacatcaaacatcgctttcatgtcatccaatgtagagtctaaaaccgtttcaaatataccgaagcctgcattgttaatcagtacatcaaccgagccgatctgatcgcggacccgggcgatatcctctaggcggccgacatccagaggaaaaatctcacactgtccgctccattcctcggttattttccttttgatttctatcaaacgatcctcgcgtctagccgacagaaggacatgggctccttcagccgcgcataagtatgcgattctttcaccaagccctcctgaagcgccggttatccaaatcctttttcccgctatatgtttcacccatttcacctcttcattgttttaaagtatgcggtatttccttcccaatatgacgtgatggcttcttcagcctccaacacatcaaggtgacctgccgtttctgacatcgttaaaaacaattccttttcatatacagcaggaaaaagctgctgacagacctgaaaagcggtcatcggcttttcatccagcatgcgacgcacatcctccgtcctgttcctctgcttgtcaaaacgcttctcaatcagcgcttgtacactggtgataggctcgccgtgaccaggaaatacgattgttggatcaagttgagacagccttcgcaatgaccgctgataatccactaaaggctttgacctgacgtcccccgctttcggcgcttccaaaatcggattagacgagctgtttgccagcagtagatcgccgccaagcatccttccgcttttttcatggaacagaacgatatgcgattcagcatgtccaggcatctccaacacggaccagccctcaagcccatctatgcccataccttctctgattgtttttgtcagagatctcgtacaggaaaatgcgtacgctgatcgaatcagcttttccgccttccccgtatcaaatggaacgcctaattcaggcagcagcttttgaaaaaaacgtttttgccaatccataaaggcttgatctcggctgatataaggttcgttgaatgtatgcccaatcacttcgatttcatctgaaaagacatcaagcaagcctgcatgatcagcatgatggtgagtcagtacaacctgctcgatatctgacattttcacatttacagcggcaagctgctcttgtagggctctggcagcctcttttgtattcggcccggcatcgataagtgtcagtgcatcaccttttacgaggtaaacgataacatcgccgacagcaaacggcgtcgggacgcggatcgcaattacatcttcagttgtcatcctttcgctccttgtcttcattcattattcatattttagctttttctcggtcttgtgtcattattgcagaatgagaacaaacctttttgaaaaagctattgacattagcttatccgccattgcataatgaacaacaaactaaaacgagaaccattggaacgctatgacgaggaatagtatacaaggcaatggcctaagagagcgatacccccggctgaaaggtgttgcggcccgcttgtttgtagaacctgccctcaagtcgcggttaggaaaacctaaacgtttcccgcgttacgggatttgagctgagcacaatttgtgctaatgagggtggtaccgcgaaccttttcgtcctttacgtgatgaaaaggttttttgttgttctgatagaaggaggatatcaatgaaaaagataggatttgtcggcgccgggtcaatggcagaagcaatgatcaacggcattttgcaaagcggcatcacaaaaccagaacatatctatattacaaatcgctcaaatgacgagcgtctgattgaattaaaggaaacgtacggcgtgcgtccatgcagagataaaaatgagtttttcactcacaccgatatcattatcctcgctttcaaaccgaaagacgcggcggaaagcatcgacagcatccggccgtatatcaaggaccagcttgtcatttcagtacttgcaggccttaccatcgaaaccattcagcattattttggcagaaagctcgcggtcattcgcgtcatgcctaatacatcagcggcaatcagaaaatcagcaaccggattttccgtaagcgctgaagcaagccagaatgatattagtgccgcaaaagctctattgaaaacaatcggtgatgcaacactggttgaggagcgagatcttgacgctgtcactgcaatcgcaggcagcggcccggcctatgtgtatcgttatattgaggcgatggaaaaagcggcacaaaaagtaggattagataaagaaacggcaaaagcactcattttgcagacaatggcaggggcaacagatatgctccttcaaagcggcaaacagccggaaaagctgcgtaaagaaatcaccagtcctgggggcactacagaggcaggtcttcgcgctttacaggactcccgctttgaagaagcaattattcactgtattgaagaaacagctaaacggagcgcagaaatcaaagaacagtttgccgttgccgccttagagagacattcttagatgtaagacaaaaacagaaggcactgtgccttctgttttttatttttcccgcagcagctggccggcagattctgattgctttaatagcgcggagatcgtaaatgaaagcaaatcgggaagcacttcaaaggaataaggcatatacaatctttccgtccatttatgcgggtctttaccagccggaccgacatttaaaaccggaacatataaagcctgatttttaccgcttggcaatgaatatcctctgttaaagagcggcatattgcttgtgtatgcatcaacctcctgtttttccagctgaagataactcaagtccgaaagtccggggaagtactgaacctcccgtaatgcaatgccgtatcgctcagccgcataatgctttatctgatctgctgtatttctgatcaattgatcatcctttgaagaaacagctggataaagcggcggactataaaacagaacgatgagcggcgcatcctccttacaaagcgaagcaagctcagaaacaattttcgtcgaaaaatccctgtctccaagctcccccctgttagcaaaggcataatttagagcccgctctgtttccgagatccccgcacgcttttttgcacgcgagaccagctcatcaaatgtcaaaacagtgacgtcccgctcaatcggctgaaatggctcaaattgttgaaaatcctgtgttttcttccgaacgttcgacatgatttcctccgccgcctgttctgctgttttaagcagcatctgatgcagctcactagctgagcgtttcattgacagcacattaaataatgtgacggctgtatgcggtgtctggactgaatatgcctctttcaagtccttttgcattaagtttaccggcggcggagtgacctcgccatcaaccttttcgcaataatcagcattcagttcaagcaaacggttaatctcagataccattaaatttgcgtttaggcctgaaaacggctctccaacatgtgtctcaatccccttgcagaaaaaacccgcaagcaccttgccaatgcttcctgtataaaaatattgctgctggtcgccgggaaatttttcaaacatcggttcggcattcaggcaagcggttaatgtgatatcatgctttttctccatctccttcaatgcaggaaccgcttcaatcatgcctcttgaattcacttcctcgtccggaaccgttatcaacagcagattgccctcaaaatgcccgttcattgccctctccagcatcgacagttgaatacaaagccccgctttcatatccatcgtccctcttccgaacagccagtctccgctttcggcatctcttctcacacgttccgggagcagctcttttttctctaaaaaggagctcaaaagctcagcaggcttgcaagccatatgtttaaattcgccgtaatcttctatgtcaacgacatcaaaatgactcagcagaagcactgtctttttgacattcttctttttgactagagccgtaagaaaagatctgccatcgtccatcggatgaagtgttacatcatcagggtgcttttgaaaatagggcttgtccttcaaaataaaataaagatactctgcaagcgctgcctcgccctttgaaccggtgatgctttcgtattgcacaagagaagttaaaagtgccagcaattcgtccttcgtctgccaattcattgattccgcccctcctatgaataaaaatgcttctatactgaaaaataaactgatttctcgtctattatacagaaatgtttgacaaaagcggttcatttgagcagtttatatgacgggaaagaaatgacttgatataatcaatctctaaaaaccttacgggaggcgaaagaaatggccagaaaattatttacacctattacaattaaagatatgacgttaaaaaaccgcattgtcatgtcgccaatgtgcatgtattcttctcatgaaaaggacggaaaattaacaccgttccacatggcacattacatatcgcgcgcaatcggccaggtcggactgattattgtagaggcgtcagcggttaaccctcaaggacgaatcactgaccaagacttaggcatttggagcgacgagcatattgaaggctttgcaaaactgactgagcaggtcaaagaacaaggttcaaaaatcggcattcagcttgcccatgccggacgtaaagctgagcttgaaggagatatcttcgctccatcggcgattgcgtttgacgaacaatcagcaacacctgtagaaatgtcagcagaaaaagtaaaagaaacagttcaggagttcaagcaagcggctgcccgcgcaaaagaagccggctttgatgtgattgaaattcatgcggcgcacggatatttaattcatgaatttttgtctccgctttccaaccatcgcacagatgaatacggcggctcacctgaaaaccgctatcgtttcttgagagagatcattgatgaagtcaaacaagtatgggacggtcctttatttgtccgtgtatctgcttctgactacactgacaaaggcttagacattgccgatcacatcggttttgcaaaatggatgaaggagcagggagttgacttaattgactgcagctcaggcgcccttgttcacgcagacattaacgtattccctggctatcaggtcagcttcgctgagaaaatccgtgaacaggcggacatggctactggtgccgtcggcatgattacagacggttcaatggctgaagaaattctgcaaaacggacgtgccgacctcatctttatcggcagagagcttttgcgggatccattctttgcaagaactgctgcgaaacagctcaatacagagattccggcccctgttcaatacgaaagaggctggtaatgccataagagatatcctgtagaggatatctctttttttatttttagagaaacgatcggctaaggttctccgtctccctagtagaaccaattagaggagatgactccaatgaaatcagcttggatggaaaagacatatacaattgacggatgtgcgtttcatacacagcaccggaaaggatcaagcggtgtaacgattgtctttgaggccggctatggtacttcttctgagacgtggaaaccattaatggcggacattgatgatgaatttggcattttcacatatgatcgggcaggcataggaaaaagcgggcaaagcagagctaaacgaacagctgatcaacaagtgaaagaattggagagtttgcttaaagcagctgatgtaaaacctccttatttggctgtttcacactcatacggagctgtcatcaccggtttatgggcctgcaaaaacaagtatgatattatcggcatggtccttcttgacccagctttaggcgattgcgctagctttacctttatacccgaagaaatgcacagatcacatacgagaaagatgatgcttgagggcacacatgcagagttttcaaaaagtctgcaggagctcaaaaagcggcaagtccacttaggaaacatgcctcttcttgtgttgtcatcaggagaacggactgagaaattcgctgctgaacaggagtggcaaaacttgcacagcagcatattgtctctatctaaccaaagcggctggattcaagctaaaaacagctcccacaacatccatcatgatgaacctcatatcgttcacttggctatttatgacgtatggtgcgcagcgtgccagcaggccgctcctctttaccaggcagtcaattaacgtaaaaaaagaccgggccgtaagggattcccggtcttttatattattttgtttcacggtgaagggtatatttctttaaacgcggtgaatattttttcagctccaaacggtctggattggtgcgtttattttttgttgtgatgtaatttcggtctcccgtttcagtgcaggctaaagtaacatttactctcataattaacatctccttataaagcgtaatgattacgttttattatacaacgtcatcacaaattgtcaaataagagctccgccttcagcctcgcgggacgtttacctctaagaaatcatatgccgccacgctattggggaaaacgtcaaccgcttctttttgaagctccaaagaagcatctccctgatatcttgcgctgatatgggttaaaatgagctgcttcgctcttgcttctttcgctgttacagccgcttgttccgttgtactgtgataataatcataagcaagtttacggtcttccttagcaaaggttgcttcatgaacaagcacatcacaatccctcgcaagctcttttagtttgtcacttactctcgtatcaccggagaacacaacagatcttccctttttaggaggctccagaaaatcattcccattgatgattcgtccgtcttcaagcgttaccgtttcgccttttttgattttctgatatacaggtccgggcgggatgttcatttcttttaatacgtcagccttcaaggaacccggtacgtctttttcctgcacacggtacccgaaggcttccactccatgaataacagataccgctgtgacaataaactgatcgtcctcaaacacgattccttcttcaatttcctggatcgcaagcggatatgtcaaatgggttttcgtgacggcaaggcttgtttcaataaacgccttgatccctttaggtccgtacactgtcagctcgtcctctccgccttgaaaggaacggctccccagaagccctggaagtccgtatacatgatcgccgtgcatgtgtgtaataaagattttctctattttacgaggtttaatcgttgtatgtaaaatttgatgctgtgtggcttccccgcagtcaaaaagccataccgaacgcctttcttcaagcaattttaatgccaccgacgttacatttctcgccttggcggggatgccggctcccgtccctaaaaaaagtaattccacgtttccttcctcctactagaaccagatacctacaagaatacaggatcaagctcaaaatgtgaatcttgcctctgaaaagaacaatcctttcgtgctagaaacattttttcagcattctgcttaaaaaagggcttaaatgtttgctttcgttgaattttagatttaaaatgaaggaaatatacggggtgtactaaaataaagcttcgaataaagtgaggtacttttagtgaaaacaaaccaacaaccaaaagcagtaattgtcatattcggtgcaactggagatttagcaaaacgaaaattgtatccgtctattcaccgtttatatcaaaacggacaaatcggagaagagtttgcagtggtaggagttggaagaagaccttggtctaatgaggatcttcgccaaactgttaaaacatccatttcctcatctgcagataagcatatagatgatttcacgtctcatttttactatcacccgtttgacgtgacaaaccctggttcttatcaagagctaaacgtattgcttaaccagctggaagatacatatcaaattcctaacaacagaatgttctacttggcaatggctcctgaattcttcggaacgattgcaaaaacattaaaatcagagggtgtaacagctacaaccggctggtcccgccttgtcatcgaaaaaccgttcggccatgatctgccaagcgcacaggcattgaataaagaaatccgcgaagcatttacggaagatcaaatttacagaatcgaccattatctaggcaaacaaatggttcagaacattgaagtgattcgatttgccaatgcgattttcgaaccgctttggacaaaccgctacatttcaaacattcaaatcacatctagcgaatcactaggcgttgaagaccgcgcaagatattacgaaaaatcaggcgcccttcgcgacatggtgcaaaaccatattatgcagatggttgcccttcttgcaatggagccgcctatcaaattgaacacagaagaaatccgcagcgaaaaagtgaaggtgctgagagcactgcgtcctattgcaaaagacgaagtggatgaatactttgtgcgcggacaatatcaagctggtgaaattgacggtgtaccggttcctgcttatacagatgaagataatgtcgctcctgactccaatacagaaacctttgttgccggcaagctcctgatcgacaacttcagatgggctggtgttccattctacatcagaaccggaaaacgaatgaaagaaaagtccacaaaaattgtcgttcaatttaaggacattccgatgaacctgtactacggtaatgaaaacaacatgaatccgaacttgcttgtcattcatattcagcctgacgaaggcattacgctttacttaaatgctaaaaagcttggcggagcagcacacgcacagccaatcaaactcgattattgcagcaattgcaatgacgagttgaacacccctgaagcatatgaaaaactcattcacgactgtcttcttggcgatgcaacaaactttgcacactgggatgaagttgccctttcttggagctttgtcgactctatttctgaaacatgggcagcaaacaaaaccttatctcctaactacgaatcaggctcaatgggaccgaaagtatctgatgatcttttggcgaaagacggcttacactggtggaatatataataagaagaaaaaagccgaaaatgtttacaagcattttcggcttttttgcagctgtcacagaggtatagcactctcattaataacaaaacccccgaagctctatagctttgggggtttctattgattacttcatccattcagtatggaagatgccttctttgtcagtacgctcatacgtatgagcgccaaagtagtcgcgctgtgcttggattaagtttgcaggcagtacggctgtgcggtagctgtcatagtaggctaatgcgcttgagaatgatggcaccggcacaccttgggcaactgcaagtgaaatcacttggcgaagcgctccttgatagctttctacaatattcttgaaatagctgtcaagaagcaggttgtcaagctcaggctcgcgatcgtaagcttctttgatcttctgaaggaatgccgcgcgaatgatgcaaccaccgcggaagatcatagcgatttcaccatatttcagatcccagttgtattcttcagaagcagctttcatttgggcaaatccttgcgcgtatgaacagattttactcatgaacaacgcttttctgaccgcttcaatcagctcttctttattttctgtaacaggcttcacttctggtcctgaaagaagtccgctcgctttcacacgctcttccttcatagctgagataaagcgtgcgaatacagattcagtaataatcggaagcggaacgcctaagtcaagtgcgctttggcttgtccattttcctgttcctttttgccctgctttatcaagaatcacatcaacaagcggcttgcctgtctcttcgtctttttttgtgaagatgtcagccgtaatctcaatcaggtagctatcaagctcacctttattccattcagcgaaaacttcatgaagctcatcagcagaaaggcccagcacctgtttcagaatgaaatatgattcagagatcagctgcatatctccgtattcaattccgttgtgcaccatttttacgtaatggccggcgccgtccggaccgatatatgtcgtacaaggttctccgtcaacttttgcagaaatggcttcaagaatcggttttacaagctcatgtgcttctttttgtccgccaggcatgatagaaggtcctttaagtgccccttcttctccgccggaaacgcctgttccgataaaatgaatgccgctttcagcgagttctttgttacggcgctgtgtatctttatagtatgtattaccgccgtcaattaaaatatcatccttctctagatgaggaagaagagattgaattgtcgcatctgttgcagttcccgctttaaccattaataagattttgcgcggtgtttccaaggattggacaaattcttcaatgctgtatgtgccaacaacattttttccttttgcctcctgtaaaaactcctcagttttactgcttgatctgttgtaaacagaaacagaaaatccccggctttcgatatttaaagccagatttttacccatgaccgcaagtccgataacgccgatttgttgttttgacatattctaacgtcccttctgcaaacgtttaatcattttaaaatttaaattaaaataaaatgatatttataataaagaaattaccatacattcaccctttttttcaagcgattcagcttttcttttcatcatgaaaaaaatctttattaaagcttgttccctttgttttgctctcctctttttttaacgttgccccttttctgatcagtttggtaccgtactttttattcagcttttccatcatctgctgaataggctcatccttcgcatcttcattaaagctgaacaaatcgagctgtttataggcctgctctttttctactaaatccgttccggtaatgccaagcagcctgacaggatttttattccagtgtttaaaaaagaggtgctccgcttctttcaaaatgtcatttttttgatcaatcgggtttctcagcgtggtgcttcttgtgatggttttccaatccgcatatctaatcataataaaaagcttcgaagccatgacttccttgcgctgtaaacgggcactcacagaagcagcaagctttctaaagacgcctaacagctcttcttcatcactggaatcatgggaaagtgtcgatgagttgccgacgcttttaaattcgtaaatgcgctccgggtcaaccggcgcatggtgaatgccatttgctttatttttaaggcgcggaccgtttatgccaagcaggcgtttcagggagtgttcatcagctgcagctagctctccgattgtatggatgccgagtcccttcagtttttccgctgtctttttgccgactccgtgcatctctccaacaggaagcggccacaggatatcaggcacttgcctctttcttaaaatcgtaattccaagcggttttttcatatcagacgccatcttagcgagaaatttattcggtgcgatccctatgcttgacgggagcagcagctctttttgcagcctgctttggatttcttttgccgtctctagcgcgcggctgctgtatggtgtatcggtcatgtccatatagccttcgtcgatggagacaggctccaccaggtcagtatattcacgaagaatggtaaacatcgctcgtgaagagtttctatagcggtcaaagttcggcggaagaacgatgagctcagggcaatggcgcttcgcttgccaaaccggcatcgttgttttgacgccgcgcgctcttgcttcgtagctgcatgttaccacaatgccctttcgctcctttacgtttccggcaactgcgaccggctttccccggagagccggatcatatgccatttcaaccgacgcataaaagctattcatatcaatatggaaaataattcggctctttcccggcataaacaaatctccttttcggtcattagacaacagcttgtacatatagtaaaatgaagctattgaatggatgtgatgacaatgtttgtggaatcgataaatgacgttttattcttagtcgattttttcacaattattcttcctgctctgacggcaatcgggattgcattcctcttacgagagtgccgtgcgggcgagcaatggaaatcaaaacgaacagatgaacatcagacggtctttcacattaaccgaacagactttcttattattatatatcatcgcattacaacttggatacgtaaagtcttccgcatgaattcgcctgtgaacgatgaggaagacgccggttctcttcttttataaaccgcatttataaaaaggaggagaacaaaattgttaaaaacatatcaaaaacttttggctatgggtatctttttaatcgtattatgctcgggcaatgctgcatttgcagcgactaatcaggtgggaggcctcagcaacgtaggttttttccacgattatttaatcgaaccgttttccgctctgcttaagggtgttgccgggctgtttcacggagaatacggactctctattatcctcgtaaccattattgtgcgtatggttgtactgcctttgtttgttaatcagttcaaaaaacaacgcgtgttccaagagaaaatggccgttattaaacctcaggttgacagcattcaggccaaattgaaaaaaacgaaggaccctgaaaaacaaaaagagctgcaaatggaaatgatgaagctgtatcaagagaacaacatcaatccgcttgctatgggatgcctcccaatgctgattcagtttcctattgtgattgggttttattacgcgattcgctctacacctgaaattgcgtcacactcgtttttatggttcagtttaggacaatctgacattctcgtgtctcttagcgcgggagcaatgtactttatccaggcctatgtcgctcaaaaactgagcgcgaaatattccgctgtcccgcaaaaccctgcggcacagcaatccgcaaaattgatggtgttcatcttccctgtgatgatgacgattttctcgcttaatgttccggcagcccttccgctgtactggtttacaagcggactgtttttgacagtgcaaaacatcgtccttcagatgacgcatcataaaagtaaaaaaacagccgctcttactgagtcggtgaaataaaaaagcaaccccgcgcgaaaagccggggttgttttttgttacttgcaaagcataccgcgccaaacagtcttgtttatcatagctgaagcagaaatggccatccaaaaaatagccgtatcgtttaaaaagaaggaaatagggaatacctttactcacctccaaacgaaaggagcatatacgttgacggaacactttcagcaaaaaaacatttctgtacctgatggaatctggatcatgagacaaacctggaatgatgtcttatttgctcactggcctgttgatgtttctatccttcgcgctttggtaccgtccgttttagaattagatacatataacgggcaagcttggatcagcatgcttccctttatgctcacgaacctaagggcgcgttatcttcctgccattcccggtgcgcgtgcatttcctgagcttaacctccgcacctatgtcacgtataaaggcaagcccggcatttatttttttagcttagatgccgatcatcgtctggcggtccttggcgctcgcacattctttcatctgccttatttttacgcggatatgaagtccgaaaaaaacggtgatgccattgactatgtcagcaagcggaaaaatgacaaagaagcagcattccacgccgcataccggcccatttcagcgccttttacagcagaaaaggattcgctcgattactggctgacagaacggtatagactctatactaccaatcaaaacaaactctattacgaagacatccatcatcatccatggctgctgcaaaacgccgaagcggaaatttcagtcaatacggtgactgatgctcacggcattacattgccagagtcagaccccttgcttcattacgctaaaaaacaggatgtgttattttggccgcttaggaaatggagctaaaaaaacccgatgcgggaaatcgcactcgggttttctttttttattttgccgcctcttcaataatggcaacaaccatttctgccgttttaacgagctcttcgatcggcattttttcattttttgtatggatttgctcataaccgacagcaagattgaccgtcgggatgccatgaccagcgattacgttcgcgtcgcttccgccgccgctcgtttgcagctcgcttggacgtccgattttagcagccgcttttttcgcgatttcaacaacttggtcgccgtcttgatatttaaagcccggatacataacctcaatttcgacttctgcgcgtccgcccatatcagcagctgcctcttcaaaagcagctttcattttttgaacctgagcttccattttctcaggaactaaagagcgcgcttcagcaagaatatgaacttcgtcgcacacaatgtttgtttgtgtgccgccttcaaaccggccgatattagctgttgtttcttcatcgatacggcccaatggcatttttgaaatggctttgctagcgattgtaatcgctgaaatgcctttttcaggttcaaccccggcgtgagcggttttcccgaaaattgccgctcttaccttcgcctgtgtcggcgcggccacaatgatatttccgacttttccgtctgaatcaagagcatagccgtaggatgcagtgatcatagaacggtcaagcgccttcgctccgatcagacccgattcttcccctactgtgatgatgaattcaatcgtgccgcgttcaatgttttcttctttcagcaccttaatcgcctcaaacattgcagccaatcccgctttatcatcagcgcctaaaatcgtcgtgccgtcagttttgacgtaaccgttctctacaactggttttacgccgtttccgggtacaactgtgtccatatgagatgtaaaatagatcgtatctgtttgttttgtcccttttagcgtgcaaatcaggttaccggctccgtggcccgtgatatccattgtatcgtcttctttaacgtccacacctaaatcagaaaattttcgtttcagcactttgcagatttcagcttcgtgctttgtttctgagtcaatttggacaagctctaaaaattcttccagcaggcgtttttcattcaccatttgtaagtccctccatattaaagcggtatgttaccgtgcttttttttcggtctctcttctgtcttatgtgcaagcatatgaaaagcttgaatcagttttccccttgattcttccggcaaaatgatgtcatcgaccattccacaagctgccgctttgtatgggccggcgttttgctttttgtattcagctgttttttcgcgtttcgtcttttgcgggtcagctgaagctttgatttccttttcatacaaaatcgatgccgcaccttctggacccatcactgcgatttcagcattcggccatgcaaacacaaggtccgctccgatcgctttgctgttcatggccacataggcgcctccgtacgcttttctaatgatgagtgtgacttttgggacagtcgcttcagcataagcaaacaataattttgctccatgcctgatgattccattgtgctcttgctgaatacccggcagaaaccccgggacatcttcgacagtcaatagcgggatatcaaatgcgtcacaaaaacggatgaaccttgctgctttatcagcagcgtcaatcgtcaggcttcccgccagatgcttcggctggctcgccacgatgccgattgctttttcacccagccttgcaaacccaatgacaatgttcttcgcaaaaaatggctgaatctcaaaaaaagattgcgggtcagccagctccctaatcaccttccgaacatcataagcctttgtcgtatcagcagggacaagacggtttaataacggtctggacgcctctttctctggcttcggctctgttgtccggccattcagcggcaaataagacagcagttttctcacccctgtcagaacctccttctccgtatgcccggaaaagtgggcgtttccgctgacggcattatgtatccccgctccgcctaagctctccgcatcaacctgttcccctgtcactttttcaatcaccttcgggccggtaataaacatccggccggtctgttcagccataaatataaaatctgtgagtgccggagaatatacagcgcctccagcgcacggccctaaaataaccgatatttgcggaatgactccggaatataagacgtttcggtaaaatatgtgaccgtatccatctaatgataacacaccctcttgaattctcgcaccacctgagtcattcagcccgataatcggcgccttattttttgctgccagatccatcaaagcgcagattttcctggcatgggtttcgccaagcgcccctccgtacactgtgaagtcttgcgcaaatacataaactgagcggccgtcaattgtgccataccctgtcacgaccccatcccctaacatgcgctgttctcttgttaacacttgactttccatgaaggggtgtaattcgataaagctgtcctgatctagaagaaatatgatcctttcccgagcagtgtgcttgcccttttgccgctgctgagccagcttttcccgtcctccgccttcttctgcctgcttgcgtttcgtgtataaatgatccatgtgttcattcatgctcattgtgttggtctcctttcggttcacaaagctctacaagaacaccgtttgtttcccgaggggaaataaacgcgatctttttcccgttcgctccctgtcttggaaacctgtcaatcaattgaacatgctggtcagacaatgcttgaagctgttcagataggccgttgcacaaaaacgcaatatgatgcagtccctgccctttcttctccaaaaataaatggacggggctgtcagctgtcaacggctctatcagctcaagtttgacgctaccagcttgaaaaaaagcaacattcaccttttgctcttcaaccgtttcttgatgaagaaatgcaagccccaatacattttcataaaagcttcttgcatcttttatcgaaaaaacggctatcccgatatggtcaagcctgttcattttcatccctgctttcgctaatagatatcgcttgtccgcccattcaaaacacgctaaaatatagacagattgtttaaggagtgaaaatcatgtctcaaaaactgatgaaaagcgttttgatcgtgattttgggagtttttattctttcaactgtactctcaggaatcgtcatgtttctataacgataaaaaagcaggcgccttattcaatgggaatatcctgcttttttatcagagctttatgctcgatggcaatctcctcaaaagagcggttgtcgtccgtgatcagcactctcgttcctactggtatcgtttgaaacaaatgaacaacctcatcgttatgcatacgtatacagccgttagacacaaattttcctactgattcctctcggtttgtcccatgaattccataaatccgcccgtccgttcctttcgcgtcaaatccgatccatctggccccaagcgggttatcaggagatcccccttcaatatttttctttctgtagtaaggattttccgcttttaccgttaccgaaaactctccttcaggcgtcaaatcatctgtttttccagtcgccacactatacacgccttctactttgttgtcgagaataacagcaagttcatttgttcgcttgttgacaataacatacggatcacctggcagcggattttcgccgagcggccaaatcggtgaaatcatcattaaaatcgaacataagaaaaaacgcataagctcctcctttttcattaggttgaccaatgaaggaagagctcatgcgaatcatccgagtgatttttgcgcttttattcctttaaaataacttttaatcactaaatattgttccatttcgccgagaagatggaagagagcggccctcgcttcaaattcctctctagtcgcaggaagcggcatctcctcaaattcttttctcatgtcagcaagtcttttcagaaatttgtacgctgtattcccagggtgtatcgcctcccgcaaatcatgaataaattcagcgatcatttttccctgatctaccgtgatggagatcgatgtcactttagggagaaggcgttcgataatttcaaattgcttttctctcattttaaaataatgataatgcagattttcgtaacgcaaaatgtggttttgcacatctcgatatgccaggtttttagcctccgtaatgagctggtgcgtttccggaatttcttttcctgaccaatcttgctcaccagttaacaaataccgttcgatttctgcaaaaatgacagcaaagttatcctctatctttttgcggtaggcaatcagtttccggtcaagactaggcatatacaagttcatcaatagagcgacgccgatgccaaccgtaatcagctgaacttcattccagatgaaagcaagcgtaatgccgccggacatgtataaatgaaggataataacggaactggtgacgataccctcgttaatttttaacagaaccgttatcggaatgaatatcaaaagaagcgctccgatcacaaacgggtggtagccaataagctcaaaaaagagataagaaaaaacaattgccagacagcatgccgcaaagcgggcccatgaggcctgaagcgaccgtttttgtgtgatttgtatgcacaaaatggtgatgattcctgctgatgcgaagttttgcaaatgcaataactggcttatataaatagccaaagctgttccaagcgcggtctttattgtgcggtaaccaattttaaacatgtcggactccatttctatttgtttcttcaataaaaaagaagaggcggccagccttcttcttttttatattctataatattttctctaaaaagtcctgcgctcttttggattttggcgacataaaaaattccttcggattgccgtcttcgacaatcattccttggtccataaacagcacacggtctgccacttcttttgcgaagcccatttcatgtgtgacaatcaccatggtcatgccggtttcgaccagctctttcatcacctgtagcacttctttgaccatctctggatcaagggcggaggtcggctcgtcaaacagcatgatgtccggattcatcgcaagagccctggcaatcgcgacacgctgtttttgtccgccagacaaacggtttggatagtcatttcgcttttcaaacaaaccgactttgcggagcaggtcctcagctttctcctgtgcagcctgttttgattctttttttacattgacaggcgcgtacatgatgttttcgagaaccgttttgtgcggaaagagatgaaaatgctgaaaaaccatcccgatgttttcccggacctttaatgtgttggttttcggcttcgtaatctctgtgtcttttattgtaatggttccgccgttaggcttttccaacaggtttaaacagcgtaagaacgttgatttgcctgagcctgaaggaccgatcacggcaacaacctcaccctcagcgattgttgttgaaatgttttttaatacttcgtgtttcccaaatgattttgacagcttttcaaccttaatcattggatttcagcttcctttctacagccttgccgataaacgttaaaatcaggacaagcacataataaatcaatcccgcgataatgagcggctcaaggtaattgtaagtggcggcgccagcttgatatgcgcgtctcatgacatcaccaagcccgatgacggtgacgatcgccgattcttttgttaacgtaattaattcattcacaattgcaggtgatatatttttgaaggcctgcggcagcagcagatccttcatcatttttccatacgggacaccgagtgcaacagcagcttctttttgccctttatcaatggcattgattccggctctgataatttccgatacataagcggcggaattcaaagacaatgcgacaaccgcagcccaaaactggtcaatttgaaatccgagcagctgaggaaggccaaaatagacaatcataagctgcagcactaaaggcgtgcctcggaacactgatgtataaaaatcagcgatccagataaacgggcggaatgtgctgatcttgcataagcttagcacaataccgagtataagtccgataatagcagatacaacaacaatttttaatgtaattgccaagccttctaatataaaaggaatttgggggatcgttgctgaaaaatccaaattcatagcctttgtctccttttcttacaggaaaaaagtttcctattcaataaaaaggctcaacgaaaaagttgagccgcttttttttacttctcgccagtgaaccattttttcttcaatttctcaagctctccgttatcttccatttccttgagcgctttattgaatttgtctgtcagttcactgtcctttctgaaagcaattgctgaaccggcttcttccgctttcgcctcaggaatcacaaagccttgcaggtcatcatttgatttgaaatacccttctgcaacaatgtcttcaataatcgcggcatcgaaacggtcagatttgatttcctgcaccaaatcagaaattctgttgcggtcttctgttttaaaaccatattccggagaaagctctttccccttctcttcctgaatagagccaagctgaacgccaactgtttttcctttcaggtctttcaaagattgaatgccgctgtcttttttgctgacaatcatatggttcgctgtgtaatacacatcggaaaaatcaacttgttttttacgctcaggcgttggtgtcattcctgacagaacgagatccacctgttttgatttaagcgctgtaattaagctgttgaagtccatatcctgcacttcaatttcatagcctgccttctttgccagagcttttgccagctctacatcaaagccgacaatattatctccttctttatattcaaacggtttgtaatccgccgaagtacccataattaattttttctttccgctttctgaacctgaattgcttgagccgcacgcagttaatgcaaaggtgatgcaagcagctacaagtaataagagccattttttcatgatccatttcccccgtattcattacttttggtgtatttgaatatttattcgttaatttgtattttaaacagtttctcatttttatgcaatactatttttaaaaattatctttaagcttatctttccagtgatctcttctgatattactagataaaaattaaatcgctgtacaatccgattgaataatcccttaatatttattcatatatccttagaaatttatgcacaaaaaaacccgggctgctttgagcatccgggttgttcgtcttatacttcttcacaatattcttcaaaggcttcctgcagctttgccactacggccatcggctcatggccttcaatttcatgacgctctaccattttcatgatctttccgtctttcaaaatcgcaaaggacggagaagatggcggataaccttcaaaatagtcacgcgcacgcgctgtcgcttctttatcctgtccggcaaaaacggtgacgagctgatcaggtcttttatcatagtgaacggaatggtaggctgccggtcttgcaattcctccggcgcatccgcaaacagagtttaccatgacgagcgtcgttccttttttcgtaagtgcctcatccacctcttcggctgttttaagctcggtgtatccggcagctgttatttcttgtctcgcttggcggacaatatcattcataaataaattaaagtccatgttcaatgaagacctctcctttttcatcatctgttcttatgatagcaaggaaacgtccatatcggcaaatgactttgcttcgccgtgcactttttttgctcttcgtttactgcttacagaaaaaggggattatataactagaagtaaaataaaggagcagttgtatatgagccacaggaaagcgttactgattcataacggaaatgccggcaacaaaaatatagaaaaagcacttggtgctgtggtgccggttttatctcaccatttagatgaggtaattattaaacagacaaagaaaaaggatgatgcgtatcatttttgccgatccattgatgattctgtcgacaccgtcttcattctcggcggcgacggcacgatccatcaatgcataaatgctatcagcgctctagaaagaaaacccgcggtcggaattttgcccggcggcacgtgcaacgacttttcaagagtgcttggcatccctcaaaatcttgcaaaggctgcggaagcacttatgtcaggaaaaaaaaccagcgtagacgtatgtcagatgaatgaccgttattttttgaatttctgggggatcggcttaattgcagaaacgtcgaatcaaatcaacgaaacggaaaaagcattattgggaaaaatcagctattttacaagtgccttgcgaaccgtctcatccgctgcatcgtttccgatgacattaaaaattgatggagaagaaattaaagaagaagccgttatgctgcttgtgatgaatggccaatatattggaacgaatcgaattcctctccccgatgccagtattgaagatggcttacttgatgttctcatatgccgcaataccaacctcaccgcgttgcgggagctgatgagcatggaacagggttcaattgatcgttttaccggagagttgtcctatgtccaggcttcccgtatcgagattgaaacagacactgccaaaaaggcggatatggatggagaagtttatacacatacacccgcagtcattcaggtcctgccgcagcatatcgacatgcttgttcccgcaaatgaataactgtcatagggctttagaaagattttgcaaatccgttgactctcccctaggaggaggtcttacagtataagggatacacacttgaaaaaggggaagtcatatggagaagaaaaatattaccttaactatattattaaccaatttatttattgcttttttggggatcgggcttgtgattccagtaacgccgaccattatgaatgaattgcatttatcggggaccgcggtcggctatatggttgcctgcttcgctattacacagctcattgtctcaccaatagccggacgatgggttgatcgcttcgggcgcaagatcatgatcataatcggcctgttgttctttagtgtgtcggagtttttgttcggcattggaaaaacagttgagatgttatttatctcccgtatgctgggcggtatcagcgcagccttcattatgcccggggtcacggcttttattgcagatatcacgaccattaaaacacggccaaaagcgctcggttatatgtcagccgctatttcaacaggatttattatcggccccggcatcgggggatttttagcagaagtccattcccggctgccttttttctttgcggcagcttttgcactgttagcagccattttatcaatcctcacgctgcgcgagccggaacgaaaccctgaaaatcaggaaataaaaggacagaagacaggctttaaacgaatttttgcccccatgtatttcatagcttttctcattatcttaatttcgtcttttggtttagcatcatttgaatctttatttgcattattcgtggatcataaattcggatttacggccagcgacattgccattatgattacaggaggagcgattgttggcgccattacgcaagtcgtcttattcgaccgcttcacaagatggtttggcgaaatccatttaattcggtacagcttaattctctctacgagtctggtattcttgctgacaacagtacattcatatgttgcgattctgttggtgacagtcaccgtatttgtcggatttgatctcatgcggcctgcggtaacgacttacctgtcaaagattgcgggaaatgaacaggggtttgccggcggtatgaattcaatgtttacaagtatcggcaatgtattcgggcctattatcggcggaatgctgttcgatattgatgtaaactatcccttctactttgcaacggtcaccttagccatagggattgcactgaccattgcttggaaagcgcctgcacatcttaaagccagcacgtgataagaagcgcattctttgtgtactgcaaagatgcgcttcttctttatactgatgatagaaggagtgatggcatgaaggaatcgtattactcaattggggaagtatcaaaactggcaaacgtgtcgataaaagcgctccgttattacgataaaattgatttatttaaacccgcctacgtcgacccggataccagctaccgctattatacagattctcagctcattcatctggatttgatcaaatcattgaaatatatcggcacacctttagaagagatgaaaaaagcacaggacttagagatggaagaactgtttgctttttataccgagcaggagaggcaaatcagggagaaattagactttttatcagcactggagcagaccatttcattggtgaaaaagcggatgaaacggcagatggaatatcccgcgctcggtgaggtgtttgttttagatgaagaagaaatacggatcattcagacagaggcagaaggaatcgggcctgaaaacgtgctcaacgcctcctacagcaaattaaaaaaatttatcgagtcagcagatggatttacgaacaatagctacggcgctactttctcttttcagccctacaccagcattgatgaaatgacttaccgtcatattttcacgcctgtattgacgaataaacagatttcatcaattacgtcggatatggaaatcacaacaatccctaaagggaggtatgcgtgtatcgcgtataatttttcgcctgaacattattttctcaacttacagaagcttatcaaatatatcgcggaccgccaattaacagttgtcagtgatgtatacgagttaatcataccgattcattactccccgaaaaaacaagaagaatatcgagtcgaaatgaaaatacggatcgctgaataataaagcatagaaaaagagcattttttgaaacaaaacttcaaaaaatgctctttttgcttatttagtaaacagatgtcttctcgtcaatcgattctaaaatttgtttcactcgtccgaggaatcgtccgcacacgagaccgtcaagcactctgtgatctaatgacaggcacagattaaccatgtctctgacagcaatcatgccattgtccatgacaaccgggcgtttgacgatggattctacttgaagaatcgcagcctgagggtagttgataatgcccattgactgaacagagccgaacgaacctgtgttgttgacggtaaacgtgcctccctgcatgtcatctgcagtgagttttccgtctcttacttttttagctaggccggtaatgtctttcgcaatgcctttaattgttttttcatcagcgtttttaatcaccggaacaaataaagaatcctctgtggcaactgcaattgaaatattgatatcctttttctgaataattttgtcccccgcccacatgctattcatttgcgggaattcttttaacgcctgagcgaccgcttttacaaaaaaggcgaagaacgttaaattaaagccttctgtcttcttaaaggaatcttttatactgttgcgatatgcaaccatatttgtgacgtcgacttccatcatcgtccaagcatgcggaatttctgttttgcttcgcttcatattggaagcaattgcttttcttacacctgtgacagggatttctttatcaccggctgcagacgcaggatatgacgtctcttcttttggctcaggttttgatgcagacttcggtgcaggagctgctgttttcggctcctcaggattctgttcttgcacgccgcctgtttcaattaagcgctgaatatcttttcgtgtgatgcgcccgccggcacctgttcctgttacttgttcaagatcaatgctgtgctctccggccaaacggagtacagctggcgagtagcgctttttattgggctgatcagctgcttcggtactttttgcagcaggcgtctcagcggcttttgaagcagctggctgttcttgtttttgttcagccggattcgcgccttctgtttcaattttgcaaatcacttctccgacttgcagggtttggccttcttctcccacaagctctgttatcgtaccagtaaaagaagacggaacctctgcatttaccttatctgtcatgacttccgcgatcggatcgtatttgttcactttatcaccgggggcgacaagccatttgctgatcgtcccctctgttacgctttctccaagctgcggcatcgtcatttgttcaattgccatgattgtatcctcccttacgtctttaaaactccgctaattctctcatcgccgcttccactttatcagggttgaccataaagtatttttccattgtcggcgcataaggcatagccggaatatcaggacctgcaagccgtttgatcggcgcgtctaagtcgaacagacaatgctcggatataattgcggctacttcgctcatgatgctgccttcttttgtatcttctgtgaccaaaagaacctttccagttttggacgcagcttcgataatcgcttctttatcaagcgggtaaactgttcttaaatccaccacatgcgctgaaatgccatctttttcgagacgttctgcagcttgtaaggcaaagtggacacacagaccgtatgtgatcactgtgatgtcgtcgccttcccgttttacgtcagccttgccgattggcaggacataatcatcagccggaacctctccctttatcagacggtacgcccgcttgtgctcaaaaaacagcacggggtcttcgtcacgaactgcggcttttaagagccctttcgcgtcatatggtgttgatggcatgacaattttcagtccgggctggttggcgaaaattgcttcgactgattgagaatgatacaaggctccgtgcacgcctccgccgtatggcgctctgacgacaatcggacaactccagtcattgttgctgcggtagcgaattttagctgcttcagaaataatttggttgactgccggcataatgaaatcagcaaactgcatttcagcaatcggtctcattccgtacattgccgctccgataccgactcctgcgatcgcagattcagcaagcggcgtatccatcacgcgctcttccccaaattgttcatagagtccggctgtcgctttaaacacaccgccttttcttcctacatcttccccaaggacgaagacgcgagaatctcgttccatttcttctttcatcgccaaattgattgcatcaatatatgacattactgacatttgttcttcctccctacttcgcatacacataatcaagcgctgactcaggagctgcataaggggcgttctccgcttcatccgtcgcttcatttacgattgccataatttcatccagcatggtttgttctatctcatcggacagcaggcctgtttcctttaagtaagcttgataagtaagcaggggatcactttttttcgcttcctctacttcttcacgccctctgtagctgctgtcatcgtcatcactggaatgtggtgtaaggcggtaagaaatcgtttcaattaatgtcgggccttctcctctgcgtgccctttcgcgtgcttctttaaccgcttgataaacttccagcgggtcatttccattcacagttacgccaggcatcccatagcctatggcacggtcggaaatgttctcacatgcgacttgcttatcgtaaggcactgagattgcgtatttgttgttttcacacataaaaataaccggcagcttatggacagcggcaaagtttgccccttcatggaaatcgccttggtttgaagacccttccccgaatgtaacaaaggctgcgatatcctttttctccatacgtcccgcaagcgcaataccgactgcgtgcggcacttgcgttgtaaccggagatgatcccgtcacaatgcggtttttcttttgtccgaaatgtcctggcatctggcggcctcctgagttcggatctgctgcttttgcaaacccggacatcattaagtcctttgctgtcatgccaaacgcgagcacgacacccatgtctctgtagtacggcaatacataatccatttcacggtcaagtgcgaaagccgctcctacctgtgctgcttcctgtccttgacaagagattacaaatggaattttgccagaacggtttaacagccacattctttcatcgatttttcttgctaacagcatggttctatacatatcaacggcttcctgatcagtcagccctagtgcttgatgtcggtttatactcattcaagcccctcctttatgcttttaaaaatgaatggctttgccatctgcggcaagcgctgcttctccaattgcttcagaaagcgttggatgcgggtgaatcgtttgcccgacctcccacggcgttgcgtccagcactttggcaagacccgcttcagaaatcatgtcggtgacatgcgggccgatcatatgaacgccgagaatatcatctgtatctcggtccgccacgattttgacaaaaccgtcgctttcaccgtatacaagcgcttttccaatcgccataaatgggaacttgccgattttgacattatgcccgttcgcctttgcttcgtcttctgttaagccgacactggcagcttcagggcttgagtaaatgcacttcggcacaagcgtcggatcaagcggatgcggattgagacctgcaaaatgctcaacagcaataattccctcatgtgaagcaacgtgagctaactgcaggccaccgattacgtctccgattgcataaatatgagattccttcgtttggcagctttcattgactgaaatcatgccattttcagtaacaatatcggtgttctctaggccgatgccttcgatatttgcctgtctgccgatggaaacaagcattttctcagcagagtaggtaacggtttctccgtctttttccgcttgtatgctgatatcgtctgatgtttttgtcattgtgtcaggcagcacttttgcccctgttatgaactggatgccttttttcttaagaagactttccatttcttttgaaatctctagatcttcagtcggcaatatgcgatccgcgtattcaataaccgttaccttcacaccaaaatcatgaagcatagacgcccattcgataccgataacccctccgccgacaatgatgattgattgtggcagctcctccatttggagcgcctcatctgaagtcagtacagacttaccgtccgcttcaagacccggaagcattctcggtcttgatcctgttgcaatgatcacttgtttcgggatcagcatgtcattttcttcgccatttccccgctcaacagaaattgttcccggcagcggagagaagattgacggtccaagaatacgtccatatccggtgtacacgtcaatttttccttttttcattaaatgatttacacccgctgcaagcttatcaacaacggcttgcttacgctgctgcactttttcaaagttgagggacacgccagccgtttccaccccgaattgatcggcttcacgagctgtccggtatacctctgcgcttctaagcagcgctttactcgggatacagcctttatgcagacatgttcctccgagtttttccttttccacaacggctgtttttaagccgagctgagcggctctgatggccgcaacataaccgccggtaccgccgcccagaatgactacgtcatactcagttgccatggtgactcactcctgtctgtctattcaatacgatattgtttggattgctcttcgccctgcaatactctgagcgccccttgggcaagagactgcagttcattttcacccggatagactaaaacgtctgaaatccaatctatgtatgatctgatagcagaaacaaagcttttgccgtacgcaaggcctcccgtcagcacaatcgcttcaacttctccttttaacgctgcgctggctgccccgatttcctttgctacctgatatgccatggcatcataaatgaagcgggctttttcatcgcccccttgaatcatctgttccacttttactgcatcatttgtaccgagatagcctaaaagtccgccggtgccaacaagctttttcatgatttcttcttttgtatattcccctgaaaaacatagatcaacaagatctcccgcaggcactgttcctgctcgttcaggactgaatggtccctcgccgtgcaggccgttattgacatctaccactcgcccgcggtcatggacgccaattgtaatacctccgcccatatgggtaataatcattttcatgttctcatatcgtttgccaagagaggctgccgctttacgagcgacagctttttggtttaacgcatggaaaatgcttttccgttcaatttcaggcatgcctgaaactttcgcaagcactgacatttcgtctacgacaacagggtcgacgatatacgaagggatattcaggccgtcagcgatttcccgcgcgataatgccgccgagattagaagcatgctgaccggcgtaaccgcttttcaagtcctcaatcatgtcatcattcactacgtaggtcccgccttcaattggccggagaaggccgcctcttgcgcagactgcatcaaacttcgagatattgattccctgttcatgaagcgtttcgagaatatggtttttacgaaattcatactgatcaataattcggtcaaatcgctgcagctcttctatgttgtgtctcaatgttttttcaaaaatgcttctttcattatgaaaaacaccgattttcgttgaagttgagcctggattaattgtgagaatgcgtttttcgtcatgtagcactttcataacctccagatcaatttcttaacgtctgcttaatacactgtggccgttttgcaaaaactggcttcttgagcggcgcatgcgttcaatccgttcctctgccaagcggtcagccgctaaatatgcaggaatgccgtcacgctgagaaatctcaagtacacgctcgatattgccgtaaatgccttcaacttttttcaatgcacgttctgcattatagccgtaaagctcatctgccacgttgatgacaccgcccgcgttaatcacgtaatccggtgcataaacgatgcccatttcgtgaatttgatcaccatggcgtgtctcttttaattggttgttagccgcacctgcgatcactttcgccttcagctgtttaatggtgtcgtcgttaatagtcgcaccaagggcacatggcgcataaatatcgcagtcttgtgaataaatatcatcaggatctaccgcccgggcgccaaaatcttcaactgcacgctgtacagattgtttgttgatatccgtaacgattaagtttgctccttcttcatgcaggtggcggcaaaggttataggctacgttcccaacaccctgtacagcaatggtttttccttcaagagagtcggttccgaaagcagctttagctgctgccttcattcctctgtacaccccgtacgctgtgactggggacggatttccagaagagccgaaagcaggagaaatccctgtaacgtagtctgtttcatcatgaatgatatccatatcctcgaccgttgtacccacatcttcagccgtgatgtatctgccattcagcccttgaatatagcggccaaacgcgcggaacatttcttcatttttgtctttgcgcggatcgccgataatgactgtttttccgccgccaaggtttaagcctgccgccgcgttcttataggtcatgcctctagccaatctgagcgcatcttcaattgccgcttcttcattttcatatgtccacattctcgttccgccaagcgccggaccaagcgttgtatcatgaatcgcgataatcgcttttaatccagattgttcatcctggcagaataccaattgttcgtaatcgtatttctccatatatttaaaaagttccatgttcgttcctcctaatgtgtgtattcttcagatgcgcatattgccagcgcaatggaatacagtttattttcagcagagtccgctctgcttgttaaagcaatcggtgcttttgctcctgtaatgacagccgccacgctggccttggcaaaataaatcagtgatttatataaaatattgccggcctcaattgttgggacgagaaggatatctgcgttgcccgctacgtctcccgaaatttttttctgagccgcggcaatttgtgaaactgcgttatccaaagcaagcggtccatcaacaatgcagcctttgatctggccccttttgtacatttgagctagagcagctgcattcacggttgcttccatttttgggttcaccgtttcgaccgctgcaagagcagctgcttttggcatattgttccccactgcatgggccacatgaacggcattttgcaaaatctgccgaagctcttccagcgaaggagcaatattcattgccgaatctgtcacaaacatcagccggtcaaaatccggtatatcgaatacagccacgtgagaaaggacacttgctgaccgaagcccctcctgtctgttcaataccgctttaagcaaaacagaagtcggcacattgcctttcattaaaacgtccgctgttttatgatgcacagcacgaaccgctaatttcgccgattcctcaggagtatcggcatggacgatttccacttgatgcccttgcatggatgatgtcagctcgttcagttttgtgctgtcgcccgttaacaagaaacgggcagataggtgctcggctgccagctttacagcccggatcacttcctcatcctcagcatgagcaaccgcaatggtcttatttttgtgtatcgacgctttgccgattaaatctttcagcttcatctgttaccacctttcttgtttcgactccgccttttattatgcaagttccatgccagctcttaagggtgctgtcataccaggtatattgaaacattcgtgcagatgtttgcgtttattctgcaaattattgcatgccttcatttgcaaggccatatttatccattttgtaatataagttccgaatgctgacaccgagagcttttgctgtttttgtccggttaaaatgatgcttttcgagcgtttgctggatcaaatgtgcttcaaatttttctactgcgacagacagcttttcgccttcaatatccggaaaatcaaaacctgttccctgatctgtgtcattttctttttgctcaagttcgaatacaggcaagtgatctttttcaatccattccatatgcggattcagaaaaatcatggctcgtccaaggacattttcaagctcccggacattcccaggccaatggtaggcagataaggcgcgcaaggcttgttgtgagagcccttttacattcctgccgtaatcccggttgatcttttggataagtctgacgctcaatgcttcaatgtcctccaaccgctgccgcaaaggcgggatggagatcggatagcgattgatccggtaatacaggtcttcccggaatgttccgtccgccatcgccttttcaatatttacatttgtcgccgcaatcactctgacgttgacagggatcgctttcgtgccgcccactctgacgatttccttttcttgaaggacgcgtagcaatttggcctgcatattttgtgtcagctcaccgatttcatctaagaaaatactgccgttatttgcttcctcaaataaaccctttttaccgccgcgtttcgctcctgaaaatgcaccatcctcatagccgaacaattctgattcgagcaggttttcagaaagggctgcacaattcacgcgaataaatttattgtatttccggtcactttcgttatggatggcatgggcgaacagttcttttcctgttcctgattccccgcgcagcaagatggttgccggtgttttcgcaccgagcttcgcctgctcaagcgcaaccagcatttgctcgcttttgccaataatgtcgtcaaacgtgtatttcgcttcaagcgtgcgaataatttgtctggcgcgattaagctccgctgtcagcattttaatttcggaaacatcgtgaatcacgccgacgctgcctttcaaaatcccgtccacaatcaccggtgctacattaacgatgacctctttttcattcgggccgaccttcattctgacaccgcggacaggacgtcttgtttcaagcacctttaaatgcatgctttcgccttcggaaatatcagtgtttgcaggcttgccgatgacttctttttcagaaagccccgtcattttcgtatacgctttattgattagcaggccgatgccgttttcatcaacgacagaaatcgcctcatcggaggattgaataatcgcctccagcatcgtacggacctgctttaagttggtcacttcctctgccagctcgaccgcatcagtgatatctttaaacacacaaagagcaccgagcagacgtccgccttcatcaataatcggcagtcttgtggtcacaatttgcaaatgatcgcctaacagctgcttctggttgtattcaggcactcttgtttttaaaatccgcggcatcttcgtgctcggaatcacttcttttattgggcgcccaatgacttcctcacgtttttttccgaccattttttcggccatatggttaaagagaatgatttcttcattgatatcaataaaaatcattccatcatgggtggaattaaaaattctgtcatatttataggtttgctcttttagcatttgaatcaggtgctgcttttcttccatcagctgaaaaacgatgtatgccatttttcccggcatgacaatggtatcttcatgctttctttgaaggagctcgtcaaacacggcttgatcgccggtggtatgaatgacgatatccggtttttgttgtatgtaaggtttccaatcagatgatacggcaatcccatacttttctgcttctttcaatcccggcgcctcggggtctttgtcaactacggcaatgatatctatgatggctgttttaatcagaatatgtaataacgccgttccccttttgccggcacctactatcagtaccttttgcatcccgatacccctttgtatgaaaaaatttgcacacctatttattccgttgcaataatttgcacaaccctatgttaccacgttttcttctcttgacaaaatattttttccgctggacaataaaggaaatgaaaagataaaggggttttctgaagatgagccgacttcttgcgcttttaatattagtcatccccggggctatttctgctttaggcattaaactgatgagagatacacttttcggccatacaatcaagccattttcagctctttggctccaagggttgtcaggattcatcttttttgcgatcggcctctatgtgctggccgggttcattttatacagagacagaaaacgcaatcaagtcagctcgcgattcagaaaacgatagctgaaaaaaagccggagaatgctccggctttttttgttgcattattcgtcaggcaaaacggtcttggcaatcgttttgtctaacgcttcatagtcataataagaaatcgtatcgtacagttcttttcgtgtctgcatatcatgaagtccttctttttgtgagccgtgctccttcatcaaaccaaacatccgctcacaagcttttgccgccgctcgaagcgaggtgacaggatatatcaccatgtgaaaccccatatcttcgaattcatcggcacgataatatggcgttttcccaaattcagtcatattcgcaaggagcggaacggggatacgctcagcaaactggcggaattcattctccgcctgtagcgcttccgggaaaattgcgtccgctcccgcctcaatgtaagcctctgaacgttttattgcggcatcaagcccttcctgcgccctggcatcagtacgggcaacaacaataagggagggtgccgcttgtttaatggcttttattttttgcgccatttcctttatcggaactagctgtttgccatttaaatgtccgcatttttttgggagctgctggtcttctatttgaacggctgctacccttgcttcaagcatctcccgggctgttcgggcggcatttaagacaccgccaaatcccgtatcgatatccacaagcagaggcagatcagctgcacgtacaagatctttggcccgttcagctatctctgccgatgtgatgatccctaaatcaggcagccccctgctggctgtataggcagcaccggacaaataaatagcagaaaaaccggcttctttcgcaagcaaagcggccatcccgtcatgggcgccgggaatttgaagaatgtccggtgctgacatcagcttgcggaaacgcccggcaagctcctcttgtgacgattgcttattgacgatccacgacatgaaacaaatcccccttttacatgcagaacatgtctacgaattcatttacgcgcatcgtttgtaatgtctcatagctggtacagcgctcataaatgtgtttgtgctgtttatcaggaaaatgggttttgagattgtcagaaaacttttccagcagtttcggcactgcttcctctcttcgaaaacgatggccgaggggaaactcacattccaccatttccgtgctcgttccgtctttaaaatgaacctgaacggcatttgagatggaacgtttatcaggttttaaataatcctcggtatatgttttattttcagtcacttccattttatcacgaagtttatctattctcggatcactcgctgtttcagcttcataatgctgtgcggtgatatcaccaaaaagcaaaccgattgctgtaatgtattggagacagtgatcacggtctgccggattgtggagcgggccttttttatcaatgatacggatagcggattcatgcgttctgatgacaactcggtcaatctcgtcaatccggttctttacctgcgggtgaagaatgacggcgcactccgccgctgtctgggcgtgaaattccgcaggataagacactttaaataacacattttccatgacataagcgtcaagcggacgggcaagcttgatctctttcttattgaataaaacgtcttggaacccccaacccggtgcactcagggctgtcggataacccatttccccttttaacgacatcagcgccaaatgaacacctctgctcgttgcatctcctgccgcccatgatttacgcgagcctgtattcggtgaatggcggtatgtcctcaatgctgcattgtcaatccatgcattcgaaagcgcatttttgatttcttctcttccgccgcccaaaagctttgccgcaacagcggttgtcgcaactttgacaaacagcacatggtcaaggccaactcgatttaagctgttttctaacgccagcacaccttggatctcgtgtgctttgatcatcatctcaagtacgtcgcgtactgttaacggctcttttccttcagacagcctcactcttgatacataatcagcagcggcaaggattcctcccaagttatcggatggatgcccccactccgccgccagccacgtatcgttgtaatcgagccagcgaatcatgcagccgatattaaacgctgccctcacaggatcgagaacatatgacgttcccggcactttgcttccattcggcacagtcgttcctggaacaatcgggccaagcagctttgtgcattccggataccgtagcgccaagatcccgcagcccagggtatccagcaatacatgccccgctgttgtatacgcttcggcactagtaatctctttctcaagcacatagtctgtgatttcttcgataacacgatccgttttcggcattctaccagttcctttcatggttttgtttgatatcgcgggcccatgtaactgacgcggggacggaagagccgattattggcatgctgttcgatcacatgggcgcataaaccggacgttctcgcgctgaaaaagatcggcgtatataaaggaatcggtatgccgagcatccaatacactggggcagcatagtaatccaaattcgggtaaagccctttttccttctccatcagccgctcacccgcttcgcacatctcatataaacgatggtcaccggctttatcgcataattgctgcagcgcctctttcatcatgagtgctctcgggtccatttttttcatatacacccggtggccgaagcccatgattttttcttttcttttcagttttgtttgcaaaagctgctcaaaatcagatgtcgtttttgcctccaaaagcaaatacatcacagcttcgtttgctcctccgtgaagattccctttcagggaagcgacagccccagtcaaagccccataaagatctgaatgtgtagatgcaatgaccctggccgcaaaggttgaattcggcatctcatgctcactgtacaggacgagcgaccggtcaaaaatctgttcttccaatgaagacggcaatttccctgtcatcatgtagagaaaattcgcactgtaggatagggtttgaagcggaagaatcggttctttcttattaatgatcctgtagctggcagcagtgagggcaggcattttcccaagaagctgataggcgcgttctttgtttgcggaaggagaccgatcatcaatttgccgatcatagccagcaagtgccgacaggccggtacgcagactatccattggatgagtgtcctcagggagcagctcaagcagacggagatgatcagcaggcaggcttgaggcactgattattttacgttccagcgtctccatttcactttcttctggcagcctgccctccagcaataaatggacaagctccagatagctttttgtttcagaaagctctattaaatcatagcctcttatcaaaatctggctggactgcgtgtcaagataagaaatatgagtttctgccgcaatcacaccgtccaaccctggagaatattgctgtttctcctccatatcctcaacctccgtttttgcgttttttgtctatcaggttccgccaagcaaatacttggaaataatcagtctttgaatctcgttcgtcccttcataaatttgcgtcacctttgcatcgcgaagcaggcgctcaactggataatccttcatatagccatatcccccataaatttgaacggcgtctaacgccgcctttacggctgcatcggaagcaaattgtttagccatagacgcttcttttccacagtttaggccgcggttatgaaggtctgcagcgtggtagacaagatgtcttgccgcctcagctctagtcgccatatcagccagcttaaatgaaatggcttgattggctgcgatcggccttccaaattgcactcgctgcttcgcataatcaacggcatgctcaagagccgcctctgcaattccgagggcctgtgccgcaatgccgatccggccgacatttaaattcgccatggcaatgtgaaagccatccccctctttgccaagcaaattggcttcaggcacttctgcattatcaaaaatcagttccgtagtattggagccataaagccccagctttctttctttttttccaacggtaaaaccgggtgtgtttttttcaacaataaaagccgaaatcccgtgcctgccttgatctggagctgttaaagcaaatgtgatatagatatcagctgctccgccattcgttatgaatattttcgatccgtttaatagatatttgccgttctttttgattgctgttgtgcggaggctcccggcatccgaccccgagtgaggctccgttagtgcaaatgcgcccaaatggtctcctgacgcgagctttggtatatatttcatcttctgttcttcgttgccgaagtacagaatcggattcgtgccgactgaggtatgaacggagagaatcacgccgacagccgcgctgattctagaaatctcatgaatcgccaaaatataagaaacaacgtctgccccgacaccgccgtactgttccggcaccggtattcccatcaggccgtgttcgcccatttttttgatcagctgaaagggaaattcgtccgttttctccatgatttccgcagcgggagcaatttcttttcgtgcaaaatcacgcaccatttttcgcatcatgacttgctcttgggttacatgcaactcggccacccccggatggaatagacttcaggaagtcctctcctcatagtcataaaaaccgcgtccgctctttttgccaagccagcctgctttgacatacttgcggagcagcgggcatggacggtatttggaatcgccaaggcctgagtgaaggacttccataattgataaacacgtatccagtccgataaaatccgctaatgcaagcggacccatcggatgattcatgcccagcttcatcacttcatctattgcctccggcttcgccactccctcatacacgcaatagatggcttcattaatcattggaagaagcacacggttggaaacaaacccaggaaaatcattgacttctaccgctgttttccccatcttttccgctaatgccataacatctaaggccgtttcttctgatgtagccaagcctcgaatcacttctaccagcttcattacagggacgggattcataaaatgcatgccaataacccgttgaggccggtttgttacagcagcgatttctgtaataggcaaggaagatgtattgctggccaaaatcgtatgaggcgggcaaatgcgatcaagtgttttaaacatctcagtttttgccgccatgttttctgcgatagcctcaatcacaatgtccgcatgctctgcctcctcaagcgtttgagaaatcgaaatgcggttgattacgctcttcacttccgtctcggtcctttttcctttctcagcatcacgggccagctgtttcttcagccgtttcaatcctgcctccgcggcctctggattcacatcatacatccgcacataaaagcccgcgccggcagctgtttgagcaattccgcttcccatctgacctgcgccagctaccatgatttgtttgatttccattcaaatcccctttttcatcatgttttaatgaacctgcactaagacggcgtctccctgtgctgccccgctgcaaatagcggcaacgcccagaccccctccccggcgctttaattcataaacaagcgtcatgagaattctcgccccgctcgcgccgatcgggtggccgagcgcgatcgcaccgccattcacatttactttttcaagatcgaaacctacgattttttcacatgtcaaaacaactgaagcaaaagcttcatttacttcaaacaagtcaatatcttggacagttaaaccattctttttcaggagcttgttaatagcaaaccccggcgctgccgccagctcgtgcgctggcattcccgtagttgaaaaaccaagaattgtagccagaggccgtttgccaagctcagcagctttttcctcagacatcagcacgaacgcgccggctccgtcattgactccaggagcattgccggctgtgatagaaccgtcacttgcataaatcggagcaagttttgcgagctgatccagacttgtgtcacggcgaatcgcttcatctttatcaacaacgtttggttttccttttcgaccgatccagttgacgggaacaatttcatcctgaaacttcccttcatcggcggccttagctgcccttgcatgacttctcaacgcccattcgtcctgctctcttcgtgagattgcatattccttggcagctgtatttccgtgaacagccatgtgcacctcgtcaaatgcgcacgttaatccgtcatacaccattaagtccctaagctcgccgtcccccatccgtgctccccagcgcccggcgggaacggcatacggaatattgctcatgctttccatcccccccgcaacaagtatgtccgcatcctgcgcccgaatcatttgatcacataaagtgacagcgcgaaggccggaagcacagactttattcagtgtttctgacggcacactccaaggcattcccgccagacgggcagcttgacgggaaggtatctgccctgagccggcctggacaaccatgcccatgacgtttccttctacatcatctccagagactccagcccgttgcagcgcctccttcatcacaatgcccccaagctcagcagctttcacctctttcaatactccgccgaatttgccaaatggcgttcttgcagcacttacaatgactgttttcctcatggtttcacctcattcagaagatagacagcgcttacaatttctagttgtcttctatgaatgtatgctttgaaacgggcatgaatgaatgaaaaaagaaggctgcgtcaaacagcctccttctaacaactattcatttttcagcaatgccgaagccttttctggaaagtcggtaaacatgccgtctgctcccgcttcaatgagacgcttcatatcttccggacgattgactgtatacggccttaccttaatcaaaccgttcctcattttcttcagtacttcatctgtgacccctgggctgtttaacttcgggtgatagccggaagccggaatagacgcgatatatcgatctgcctgataaagcacatctgaagttaatactgcccgttcgatatgcggtgcaagccgggcgcacagcgccaagctgtcatgattaaacgtggataggatgactctgtcctctacattaaatcgcttcactgcctccagcactttttcttccattccctcatagcggatcacgctgttttttaattcaatgttgatgagaaaatccttttttaccgcccacgagagcacatcttctagcagcggcacttttatatcgctgtacgcttgatcgtgaccagcggccgcatttgcagtctttacctcatcataggctgtatccttcacgaatcctttaagtgatgtcgtgcgattaagtctttcatcatgaattacaacaatgcgtccgtctttcgtcagctgtacatcaagctctatcccatccgctccggcttcaattcctttttcaaatgcaagcattgtattttcgggaaattgacctgatgccccccgatgggcaaaaatctttgtcatcgtttcacctcaaaccctaaagttttctccattatacttattttgtcggctccactctaggattaaggctgtatcaatctactgatcataataagaatcaatgccgttgacaatcgcatctgcggccttttgctggtattcttcacttcccagcttgtccgcgtcagagctgttcgtgataaacccaagctccgccaacacacttggcatttgtgaatatgtaatgacgtaaaagtctgattctttcacgcccctgtctctcgtttgtaaggaagaaacgagctctgactgaatatcggatgcgagacgccggctgttctccccttcataatcagattgaaaatacgtttctgttcctgaagctgaagcaacccctgaattcacatgaatgctgacaaaaaggtcagcctgattggcacttgccttagccactctttcctccaaggtcagaaaatgatcgtcagaccgggatgcaacaggattggctacctcctcttttagtttgtctgtcacatgctctgagacagccaaattaatatccttttcaaagagcccgtttccgaccgctccactatcttcaccgccgtgtccggcatcaatatacactgttttcccttctatcggctctgctgcctgtgcacaaggcgcgagcgtcaaagccaatccgcacagcgccaagctcctccataacattctcaacttactccctccggtcacgagttctttcgcagctgaatatcttccagctgtaaagttccattatccttctttgtatatttcaccaggacatgtgtctgatctggcagtgattcacattcatcacgtttatccttcggaacttgtatcatggtttcttctccattaagagaaaccgcaatcgtatgaggatcagccgagccaatgtattttccctcttcggtaaaccttggcactgagtcatccgcacttgcaacactgcaccccgaaagaaagagcgcagtaaacagcaaaagaaccgtttgtttcacatgaccacctcttcctgatgtttggcttttatctttgaccagaatggcgaatttgtaaagacaacgcgaatgcaggcgagcaagttccatgattttcaaaagggctatacgacccgatcatttcctgttgttagaaagataacgagcagatttgtctatgaggatggctctaattgaggcgtcaattagaaaaaattagcggaaagaagcaactttttattcattttaaaaaatttgagaatagggtgagcaaatcgtttgacgggtgggtcagccaagcgtaaccttttaaaggatatttactttattgaaagaagttaaaaccatgaaaaaattcgttctgctgctggcggcagctgtcatcacatgctccatcggccaccaaatcagcggcggctacaaaggccccgaaaaagagcggcgaaaacatcactctgcactcaagatattcagtcggtaaagcagatcaattgcattaatttttacatataggctagaatatgtgcgaatccaaacgaaagaagatgatcaaatgaatcctaagtataagccactttttgaaccatttacgtttaaaagcggcgttacaatcaacaaccggatcgcagtagcaccgatgactcattacgcttctaatgaagacggtacaatatctgaagcggagctcgactacatcatcccccgttcaaaagagatgggaatggtgattacagcctgcgcaaatgttacaccggacggaaaagcattccccgggcagccggccatccatgacgattccaacattccaggtttaaaaaagttagcacaagccattcaggcacaaggcgctaaagctgttgtacaaattcatcacggcggtattgagtgcccgtctgagctcgttcctcaacaggatgttgtggggccaagtgacgtgtttgataacggcaaacaaattgctcgcgcattaacagaagaagaagtggaaaacattgtgaaggcgtttggagaagcgacaagacgcgccattgaagtcggctttgacggtgtcgaaattcacggtgcaaacggctacttaattcagcagttttattctccgaaaaccaaccagcgcacggatcgctggggaggaagcgatgaaaaacgattagccttcccgctcgctattgtcgatgaagtgaaaaaagccgcttcagaacatgcgaagggtgcgttcttagtcggctaccgcctgtctccggaagaacctgagacaccgggattgacaatgactgaaacttatacgcttgttgatgctttaggggataaagaattggattatcttcatatctcactgatggacgtgaactcaaaagcgcgccgcggtgcagatccgactcgcacacgcatggacttattgaatgaacgtgtcggaaacaaagtgccgctgatcgccgtcggttccatccattccgctgatgacgcgcttgccgtcatcgaaaacggtattccgctggtcgctatgggacgcgaaattctagttgaccctaactggacggtaaaagtaaaagaaggccgtgaaaagcaaatcgaaacagtgatcaaaggcacagataaagaaaaatatcatttgcctgaaccgctatggcaagcaattgtgaacacacaaggctgggtgccttataaagattaatgtgcaaagactgccgaaacgattcggcagtcttttttccctttatataaatagtttgtgtacacatctaaacagcaaaagaaagagctccccaccaacttcgaaaagaaaatccaggaaaaacccctcacgctttcttgcttttttctttttcattcgtacgtctcctttttacatgaatacgccttacttacgattttgcaggagaaaggtttcattttataacggacacatctagggtcgatcatgcttcgtgatcctataagatgtatgaatggaccaagagtgcaggtaataccgccatttgctttccttacttttcaaacctatcctttactatatgcggatacttaatattcttctcccatactaacaaatgtccccaaaacaaaacgcctcctatttatcagcgcaaactaataaataaaagacgtttgatttaatgaccacttaataagctcatgtttaagaagccttatgttctaatctcagcttatccgcaaccattgcaatgaattccgaatttgtcggtttagcttttgtcatgctgacagtataaccgaacaacgaggaaatggaatcaatgtttcctctgctccatgccacttcaattgcatggcggatcgctctttctacacggcttgcggttgtgttgaattttttggcgatgtccggatagaggacttttgtaatgctgccgagcaattcgatgtcattgtataccattgagattgcttcgcgcagatagagatagcctttaatatgggctgggacgccgatttcatggataatgcttgtgatgctcgcgtcgagatttttcttctttggttcaggctggctgctgcgtataatactgctttgcgatgatggcgcacgatgcgtcacactgctggcatttccgctgacctggcggatatggccgacaaggttttccatatcaaacggtttgagaataaagtaggacgcgcctaaatcgacggcctttttcgtgacatcttcctgtccaaaggctgtcagcataatgacattcggctgttttttcagatctgattccctcagcctctctaaaaccgcaagtccgtctaaatgcggcataataatatctaatacgagcacatcgggatctttttctttaaacagcgacaggcattcctgtccgttataagcaacgccgatcacttccatgtcttcctgtccttctatatattcacttaacaggcttaccagctctcgattatcatcagcaacacaaactttaattttctccacgtttcttcctccccaaatgtagttaacaggattcacccttgctacatgtttacattcgacaaaaccgctatataccctctaaaaaaatcataatcaccaatattagtggcatatctttgttattctatgtttttctctgtttttcgactaaaaatgaaatttgacaaacaaggaaacgtgaatttgtcgaaaaatcttcttttgtatattttaccgtatgtattctgagaagtgaagagggatcaaaataaaaaaactgccggaaactccggcagtcagcttgctttttcttttccataaatatcgattcctgcttctgacagcatccattcaatatgaacaccgtagccgcttgtcgggtcatttacaaatacatgggtgacagcaccgatcacttttccattttgaatgatcgggcttccgctcatcccctgtacgatgcctcctgtttctttcaacagtcttggatcggtaattttcaacaccattccttttgtcgcagggaatttttgcggcgttgtgctgacgatttcaatatcgaatttttctactttgtcatcatcaataacggttaaaatttcagccggcccttttttgacttcggtagaaaacgcaaccggcaatgcttgatctgatatgttgttttgaatcggctgatgcagtgtgccgaaaatcccaaacgggctgtttctgttaatatccccgatcgttttgcgttctgaggaaaatcgcgccagtttttctcccggattaccgcctgtccctttttcaattgatgttacagtggatttaacgatttctccattctccactacaattggtttctttgtgtccatatcggaaatcacgtggccaagtgctccgtatttttttgttttcggttcataaaaggtcatagtgccgatgccggcagcagaatctctgatatataacccgattctgtatttgccttctccttcatccttttctgggatcagcttcgttttgattttctgtttatcacgtttgatcagtaagtctaaagattcaccagttttcccagccttttgaataaatggggctacatcattcattttttcaattttctgtccattcatctcaataatgatgtcgcccgcctcaattcctgccgtttctcccggagattttttgccttcacttgtattgatttgatgaaatccgacgacaagaacaccgacggaatgaagttttacaccgattgattgtccgccaggtataacttttaaatcaggaagaacatgcacttttgtttttttaattggaaatccggcaagatcatataccaattctgactcacctgattttttgcccgtcaccttgatttcatgcggatctttctttactgtaaacgcttctgaggattctgatgtctgagcgtttaccgataaactcgtttcaatcgcttgtgtttgggtttcaaatactctcatttgcgttggaatcagtaaatattcttttagcggtttgcataaacctacacttaataacgaaacaaggagaattaaacctactgcttttctgatgttatcgggcattcactacttcactctcctcgctcctatcccacaccttctttatgacttgctgctacatcatttaattttgccttctgacggcttatttataactgtcatatgaagaaaaacattggatatactgatgaacgaatggatgtgcacgaaaaaaataagctgcgcttctcgcgcagcttacccagttgttttgacttgatccgcttgttttaaaagttctttcgcatggcgtttcgttaaatcggttacctcgacacctgcaatcatgcgcccgatttccgctaccttttcctgcttagacagcggcttgacacgtgtcgtcgttctaccgtcttttaactccttcgcaatataaagatgcgtatcggccatggcagccacctgaggcaggtgtgtaatgcacagcacttgtgaacctattgacaccttatggatcttctcagcgattgcctgtgcgaccctgccgcttacaccggtatcaacctcatcaaaaatgatcgatgtcacatcctgttgtgaggagaaaatgctttttatggcaagcatcacccgtgacagctctccacctgaagcgactttcgaaagggattttagcggctcgcctgtattggttgaaattaaaaacttcaccaggtcaatcccttgttcagtcagctgaacgggctggccgtttacaagcggcgcctcttcattgcgtgacgctgttctgaccttaaattccgtatcaaaagttgatttttccatgtacaggctttttaattcccgatgaatctcatcagccagctttttcgcccatgtttttcggatttgtgacacatttgccgcttccactgcgacatctttgccgacggagtcaagctcctttttcaagctttgaaggtggctgtccctgttttcaatttggtcaatctcttcttcaattttagaagcatattccaaaatgtcttcaacagtggcaccgtattttcgtttcagctgtttgatttcattaagtcgcgtctcaatatagttcaggcgttccggatcaaattcaagctcatccagcatatttctcatctgaaatgtggcatcctcaagcaaatagtaggagttcgaaacactttcagacatttttttcagcggttcgtttatatcagatatatcttcaagctgcgctgatgccattccaacccagtccaatccgccctgctcactgcgaagcgcgttatatgcattttgcagcgactcatatatcttctcaaagtttgaaatttgctggcgctcttcttggagctgttcatcttcgttaagctcaagctttgccgattcgatttcttcgagctgaaattgaataagatcaagacgatgggccatttcctgttcgctttcagaaagctgcttaagctttttgagcagcttcacataccgctggtacccttcctgatacgttttgagcgcgctttccacttcggccccggcaaacttgtccaaaagctggagatgattttcgtcttccattaacagctggttatcgtgctgcccgtgaatatctaataaaagcctgccgatctctcttagtgaagcaatcgtgacaagcttgccattgacacggcaaacgcttttcccgctcgtgctgatatcccttctcatgacgatcatttcgtctgaaacgtcgattccctgctcagcgcatacgcctaaaacaggatggccgctctccaacagaaacagcccttcaagttcggcttttgcttccccatatctaacaaattcagatgatccgcggcctccgactaaaagagaaatggcatctatgatgatggatttgccggctccggtttctcctgttaaaaccgtaagcccgcgttcaaaagaaaccgtcagttcctcaataatggcaaagtttttaatcgatagttcagctaacaaacagcattacacctcttatctttgttagattttctgttacagcagttcaaggagcctgttttttacgccttctgtatcttcaggagtccggcaaataattaaaatcgtatcatctccgcaaatggtccccatcatttcatcccagtccaaattgtccatcagcgccccgattgcctgggcattgcccggcatcgttttcagcacaatcatatggcttgctgagtctattttcacaaatgcgtccatcaatgcccgctttagctttgacagcggattgaaacgctggtccgccggaagactgtatttgtaagaaccattatttgtaggcacttttacaaggtgaagttctttaatatcccgtgataccgtggcctgcgttactttgtatccatcctgctttagcatgtcgaccaattcatcctgtgtttcgatttcattgcttgtaatgatctctctgattttaatatgcctctggcctttgttcatgtaagcacctctatttccaagcttatctgttcttttatgttatatgattctctgcacattgtacatgaatgcagaaaaaaggaataatagcgccctattattccggtacatctgcttttttttcttttaacgtcttatgtgcttcttctacaacgcgcatgatctcttcttccggcagttcctggccttcctgtccctctcccggccaatgcaaatgaaggagaaactcaatatttccgtctcctcccgtgattggagaaaatgacaagcctttacagatatagccttcagcggcagaaaaactgatcattcgcttgagcacatcagcatgcactttaggatctctaacaatcccttttttgccgacggattcccgtcccgcttcaaactgaggcttaactaaagccatgcagtcgctgcccggtacgagcaaagtccttaggacaggcaggatgagccgcagtgaaataaaggacacatcaattgtggcaaactccggcatgccctttgtaaagtctgccggtgttgcataacgaaagttcgtccgttccatcacgacgacccgttcatcctgtctaagcttccatgcaagctgattatagcctacatccacagcgtatgactgtttagctccattttgcaaagcgcagtccgtaaaaccgccggtggaggagccaatatcaatcataattttatctttgacagagacgggaaattccttcaacgctttttcgagctttaagccgcccctgctcacatacctcagcgggtttcctttgacagttaacggaaggtcgcggtcaattttttctccaggcttgtccaagcggttttcgtttgaatagacgatccccgccataatggctcttttggctttttcacgcgtttccgccagccctctttccactaataatacatctaatcgttctttctttgacgtcatgatccaattcctttgtgtgtctttggcggcatcagtaatctaatacgatttgccacctgctgttttgtcagtccaatttcctcaagaagcgctgttacacttccgtgttcaataaaccgatcaggtatacccattctgtcaatcggagtatgatattcaccttgatcatgagcgaattctaaaatcgagcttccgaaaccgccttctaagaccgcttcttcaattgttaaaattggcaagccttcttttaggatactcttcatcatcttttcatcaatcggcttaataaaacgcgcattcacaacgcgcacggaaaggccttctttctgcagctcttcggctgcttcaatcgccatttcgattgttgtgccgaatgttaagatgacagcatcgttccccggacgcagcacctcccacgtaccgatcggaatcgttttcaactgttcatccatttttacgccgagtccgtttccgcgcggaaaacgcatcgctatcgggccttcgtcatagctaagtgctgtatgaaccatatgctggccttcattttcgtctttcggcatcattaagaccatgtttggaatgtggcgcataaacgcaatatcaaacacgccttgatgtgtctctccatcagcgccaacgagtcctgcacggtcaattccaataaacacattggcgttttggcggcagatgtcatggacaacttggtcatatgccctttgcaggaaggttgagtaaatcgccaaaaacggcttcataccctgcattgccatagctgccgccatcgttgcggcatgctgttctgcgattcctacgtcgaacatccggtcagggaattcctttgcgaaaccttcaagctttgaaccgacaggcatagccggcgtaatggctacaatgcgtccgtcctcgcgcgccattcgctgcacagttccgctgacaagaccgctccacgaaggagctgcggctttcggctttacaaagtcaccggtattaattttatatggtccggtaccatgccatgtcccaatcgtatcggtctcagccggtttgtaccccttcccttttttcgtgatgacatgcagaagaacagggcctttcgtttttttggcgtattgaagattctcaatcagctcatgataagaatgtccgtccactggacccaaatacgtaaaaccgagctcctcgaaaaacattccggagacgagcatgtatttcaggctgtctttgactcgttccgccgtggcggcaagcttgcccccaactgccggaatctttttaaataagtattcaagctcatctttgacccactggtatttccccgcagtacggagccgtccgagcatagagtgaatggcaccgacatttggtgcaatactcatttcattatcattaaggatgacaatcatgtcttttttctcgtcgccgatgtggttaagggcttcgagcgccattccgccggtcagcgcgccgtcaccaattatcggaataatatattcatccgttcctttaatatcacgggcagctgccattcccatcgcgcctgacagagaagtcgagctgtgcccggtttcccaaacatcgtgctcgctttcactccgctttggaaatccgcaaagccctttgtactggcgaagcgtcgcgaattcttttcctcgtcctgtcagcagcttatggacatacgattgatggcctacatcccataaaaatttgtctttcgggctgttaaattccttatgcagagcaatagtaagctctacgacacctaagtttgggccgatgtggccgccggaagcggataaacttgtaattaaaaactgacggatttcatcacttaatttctctaattcatcaatggacatgttttttaaaaacgacgggtcctgtattgataaaagatccaaagcggatcaactcactttcagcatgaatttctgcaatgatacatgtcttttgcatgccgagctgacaataatctcagacataaaaaaagacaaacgcgcttttccttttcatttttcatataaactgcttacattttaccatacctcgtgcagccgcttcaaattaggatcgttttagtgatctcttgccgcaattaaatcacaaagctcatataaaaggtctttttgaagagagagtccgccgatcaatcgcttcgcctcttttatatgaacatccaatttatgtttggccccttccaatgaaagaagcgacgggtatgtcgatttgtcatttgtggtatccgagccgacacgtttgccgattttctcttcactgccttctaaatctaaaatatcgtctctgatttgaaatccgattccaatgtggctgctgaaggtacgcagtgtttcaatgtcttcctcaggcgcatcagccaaaatagcaccggcgattacacaaaagccaaggagcttggcagttttccgttcatgaatggattcgagctcttcaagcgtgacttgtcggttttccgcttccatatcagctacttgcccaccgaccatgccttcggtgcctgccgctgaaatcagttcattcacaagccgcaggcgcttttctgctgacacctcgtctgacacgtgggaggtaatcagcttaaagctttctgtgagcagcccgtcacccgctaatactgccgtcgcttcaccaaacactttatggtttgtcggcttcccgcggcgcaaatcgtcatcatccatgcatggaagatcatcatgaattaacgaatacgtgtgaatcatttcgacagcacagcccaccggaatgccgtctttttcgctttttccatatgcatttaaaacagccagtacaatcagaggccgcagccgctttccgccggcctgtagagaatacagcatagatttctttaatgagtccggcatatcaagcttttctgtatagacagaaagctgattttcaattgtttttttccggtccgccagaaagctcgttaatttatttgtcaccttcgtcttcctcctgaacactgaaaggtgccagttcgccgtcttcttttaaaatgaagtccatttgcttttcgactttttgcagcttttcatggcacatttttgacagagccatgccttcttggaaatagttaatggcttgctctagaggcacatctccctcttcaagctttgatacaatgctctcaagccctttcatcgcttcttcaaatgtcatgttttcattttttttcacgtctgtcatttttcttcccctctcttttctaatacttcacaggtcagcacgccatccttcagcttgacttcaagccggtcctgctcttctatttgactgacacttttaatgagtttatcttctttataagccaagctgtatcctctttccatcacttgaagaggacttagtgcattcagcttgccaagaacggtttgaaattgggaatgcagctgcttcatttggatattcatattttttctcagctgatttgtttgttcctggtatcgtgttctcgcttgtttcagctgttcatgaggatgcagtgcctctaatctgtacgtttcacgctccagctgtctgcttttccgatctaaaagagcggtcagctgtgcttgaaactgctggtacgcgaggtcaaactgctgctctttttgcgcatacaaacgctttggaaaacgaaaggcataggacgattgcagcgtttgaatccgttcttttttctggccgaggtgctgctgcatcgctcttgtcattctgacttccgctgtttttgtccgttcgattaaatcagtggtatgaggcacagcaatctcagctgctcctgtcggcgtcgcagctctgatatcggcgacaaaatcactaatcgtaaaatccgtctcatgtccgactgccgatataatcggaatattggaagcaaagatggcgcgtgctacaatttcttcattgaatgcccacagttcttctatcgaaccgccgcctctcccgacaattaatacgtcgcaaatctctttttcatttgcctcttcaatgcgcgtaacgatggatctgctcgcattttcaccttgtacgagcgctggaagaacaatgacttttacaaggggatatcttctttttagagttgtaataacgtctctgacagcggcacccgttggagatgtcacaaccccgattgtggctggaaatgcggggatttgttttttgtagcggtcgtcaaataaaccttctccggcaagcttcttttttaattcttcgtacgctaaataaagcgctccaatcccgtcaggctgcatttctttggcatataattgatagtttccgctcggttcatatacggaaattccgcctctgaccagcactttcattccgttttcaggtttaaaaggcagacgctcgctttgtctcgcgaacatcaccgactgcattcttgcgttttcgtcttttaaagtgaaataaatatgccctcgtgtgtgtatctttacattcgacaattcgcctttaatccaaatattttcaaggtgaggatctacatcgaattttcgttttatatactttgtcagcgctgagacggtcacatacgctgcttcacccatgtctaaaaactcctctcctaagcattcctgcaccataactaaagaaaacccgccctggctttaggagcctgaagaagcgggtatcgtgctcatattcaaggcgggcaaacatttcgcctgtgaatatctccaattatctatgataacgtacgtttcgcagatttaacagtattatgcgcaagcatcgtgatggtcatcggacctactccgcccggaaccggcgtgatgaaggacgctttttcctttgccccttcaaattcaacgtctccgcaaagctttccgttttccagacggttaacgccgacgtcaatgacaacagcgccctctttgatctggtctgcactgatgaagttggctctgccgactgccaccaccaggatgtccgcttttttcgtatgttcagtaatattttctgttcttgaatgacagtaagtaaccgtcgcgttttcatttaataaaagctggccgacaggtttgccgacaatgttgcttcggccgactacaacaacctctttaccggaaaggtcaatattggttttcttcaaaagctcaacaattccatgaggcgtgcaaggaagaaacgtatcttcgccaagcagcattttccctacgtttaacggatgaaaaccgtctacatctttatcaggggagatacgttcgatcaccgctttttcagaaatatggtctgggagcggaagctgaacgagaatgccatgaaactcagggtcttggttatattgatcaataatggaaagcagttcagcttctgtgaggctgctgtcaaattgatcgagcttgaaattcattcccattgtttctgccgcttttttctttcctcgcacgtaagagtgagaagcaggatcatctccaatcaaaataaccgccagtccgggagtgacgccttgctttttaagctcttctacctcttttgccaattgttcgcgtttttctctagccgtttcttttccgtcgatgattgttgcagtcattttctttcctcctatgattgttcaatatcagatttaatgttagaaagaaccccgtttacaaactttgtcgctttgtcatcaccaaaccgttttgccagctcaatcgcttcgttcatggagacattcaccggaatgtcttcggcatatgccatttcatatgctgccaggcgcaaaatcgcacggtcaacattggcaatccgatcgagcttccaattcaccagatgcttggagatcatttcatccagctggtcttggtgttccaataccccgtgtacaagctgttcaaagaaaggatctgttttttcttcatccagtgcgtgttctatggcttcattcactgcaatatcgctgacatcaatttgaaatagtgcctgcaaagctttttctcttgctgttcttcttttcattttctttctcctttgatcctctttatccgcttgtcgttaagccacaaagagatcataacatatttttttcgtatccgcatattgaaatcaaggtttttttaccctattaccgaatattttcacacaccttaatatgattattcggatttcacgttcatgaagaaactcggctatgtaagccggctttcttcatgctttgaaataaagggtaacgtgtaaaaaaaccaaagggccgccctccccttggtttcgtgttaagccatttacatttcttcgtcgatttggacttcttgggcttttgtgtcaaattgaatgccgacgatgtgaatattgatctcgttaatcgaaagagacgtcatatttaataaggtttgacgaatgttttcctgaacggatgctgcaactttcggaatcgaaacgccaaatgtaacgacacagtatacatcgatcgtaattccgtcatccgccaggtcgactttgacacctttgccatgattcactttgccaaagcgctcaacgacgcctgtcgcaaagtttccgcgcatttcggcaactccatcaacttctgatgctgcaatgccggcaatgacctcaatgacctccggtgcaatctcaaccttacccaaatgcgtatcttcgtgatccattttaagcaagctgttgtctttcattcaattcacctccgtaaaaattatgagcccattacatcatatgtttctaaaaatttcgtattaaactctccgctcacaaatgtttcgtgttcaagcagttttaaatggaaagggattgttgtctcaatgccttcgatgacgaattcgctcaatgcgcgcttcatgcgggcaatcgcttcatccctcgtttttccgtatgtgattacctttgcaatcatgctgtcatagtacggtgggatggaatagccagggtacgcagctgaatcgacacggacaccaagaccgccaggaggcaggtacattttaatttcaccaggtgacggcatgaaatttttacttgggttttctgcgttgattcggcattcgatggcccagccttcaaattcaacatcttcttgcttgaggctcagttccattcctgatgccactttgatttgttccttgatcaggtcagttcccgtcaccatttctgtgactgggtgctccacctgaattctcgtgttcatttccatgaagtaatagcgctgttcattgtagtcatagataaattcaactgttccagcacctgtatagccaaccgcttttgcagcctttaccgctgcatctcccatttgctccctgatttctgaatcaagggcaggagatggtgattcttccaaaagcttttgcaggcgtctttggatcgagcagtcgcgttcgcccaaatggatcgtatttccgtagttatcagcaagcacttggatctcaacgtggcgaaaatcttctatgtatttttcgatgtatacacctggattcccaaatgcagttgccgcttcctgctgtgtaatcttaatgccattaatcagttcctcttcagtgcgggcaaccctaattccttttccgcctccgcctgcggtggcttttataattacaggatacccaatttcattagcaagcgaaaccgcttcttccacattttctataattccctgtgaacccggtacgattggcacgccggcctgtttcatcgtttcccgcgcaacgtcttttgttcccatttttgaaatggcgtcagcgctcgggccgacaaacgtgacattcacttcttcacataattcagcgaaatcagcattttcagctaaaaatccgtatcccggatgaatggcgtccgtgccagtcagctttgcaacactcacaatatttgtaacgtttaaatagctgtcttttgatgctttcggtccgatacaaaaagcttcatcggccatttgaacatgaagggcatctttatcagcttctgaataaacagcgacagtctcaattccgagctctctgcaggctctgatgattctgacagcaatttctcctctgttggcgatcaatagctttttaatcatgttcagtctccttactccgcttttacaagaaatagaggttgtccgtattcgaccagctggccgttttctactaatacttcaacgatttcgcctttcacttctgcttcgatttcgttgaaaagcttcatcgcttctacaatgcagacaactgtgttttcatttacttttgaaccggctgttacatacgggccagcttccggtgatgaagaagcataaaatgttcctaccattggtgaagtgattttatgcagattctcatcttgctttggtgcttcttgggcaggtgccgctgcttgctgcgcttgcggctgaactgcctgcggagcctgtgcttgtacaggtgctgccggtgcctgctgcatgacttgaaccgtgcctgcttcgtgttttttcagttttaaggatacaccttcattttcatatacgaattcgtcaattgtagactcgtcaattgctttaatcagctcgtggatttctttgatatttaacattcaatcgcactcctatgtatgaaatttctttttttataggttactgctaaaagtacatactatgttcatcttacaggagcggacttttgaattcaactctaatatgacagcaacgcaaaaagcccgcttgtttagcgggcttttttccctcattcttatttagagggttcaaatgtgacagcgacatctttcattgttttgatttcttttgccacaaggtctataatggctgtcgccttcgatttagagtgtttgtctgatttgactgtaatattgattttatctccttcagcattaacaagcgcatcctcgtaaccttgtgttttaatcagcgtttccagctgtttttctgttccttccacttcactgagagccgtcattttatcgtatgcttcgcttttctccttggctgttgcatcatcgcttgacacaatggcattcagctcttctctttctttgcttctggcatcttctaaatcaagacggtacgttgtaaacaaatcatcatcggctgtttccgtaacaacagttcctttttcactggcttcagcggatgtttccttgtctgctgatgaatctttcgttccctttgttccatcttcttttcctttttcagtttctgtaccgcttttttccttcgtgtcttgcttggcaggcgctttttcagttgcgacctctccgctgtcagacgcgcttttttcactttgcatctgcacggcgtttttgctttccggcgacatgatatagtagacgcttaacaccacgacaagactgagcattgttaatagccaaacggtttgttttttaagcatttatgaatcctcctttatttttttaggggcaaccgcaacccggtggcttggaacatccaggacccgtgtcaccgcttcgataatggtttgttttatttgaacgttgtccactccttgagcaacaacgagtacaccgcgtatatcaggttttttcgtttggacgacgacaggtgtttctttatcgccgtttttgatcatgacgatttcttcctccgatgtttggtctgtaacgcttcttgttccgccttctttgtcagtttcttcggtggttgtatttttgtttgatttgtttttttcgtatactttcagcgacgttgcatctacattcacgacaaccgagacatcgtccacaccaatgattgtttcaagaatttctttcagctgattttcgtattctttttcatagtcatcgatcgagtctttaggtttatcagattttgaggctttaaacacttcagctgttttctctttgctgcccgcggaatgttgcgatgatacggccgttatcgttttggcgttttctgttttctcaggtgaagaaaacagctggctgacaagcataaaggaaactccgagaacaaaaacgaatagaaagtaatgatatttggtcagcttcggcttttcgccgtccttcgtttgtcccggaagaaactgctttttcaatacattccataatccgtttttattcattgccgacactctccccgccttccatatgaaccgtaattttctcacttccgatttcccaaatgtccgcgagctgcgtttgtatctgtttggcttctttttgttcggctgcttctttcgttacgtatgcatgatctgtatcaatgtggaccggcgcgaccgtttggaccgttttttcagaagacggggccatatacacgctgattgttttaatatcctcttctgaatctaccttttctcctgccgtgagtttgatgcggcctactttatattcatcatgactgaatctctcctccgctttcttttttagttggacagccatttcttctagaatatatgcgcgctgggaagcttgtatttctattttttttgaattgatttgattttttatgtcggcagactctgactgcccgttttttgtgagatattcaaagatgatttcggggtctgtcttgaaaagtttaaaaatcggcgtaagcatgacgacaatcaagagcaggctgactaccatttttgcgtacttttgcatgctggagctcggcagcagcatatcaatcacaattgcaaataggataaacaacacgatggtggtaagccattccgttaaaaaactcattcgcctgcctccttcatttcatcatcatcgtgaggtttccggctgtgattatgacagtaaggcttaaaaaaaacatgagagacacaatagcgagagctgcaaaaatataaatgacgcttttgctgatgacgtcgaggcaggtgatgacgggcccgcctcctagcggctgaagaatcgcggctgccagcttataaataaaagcgagggaaagcactttgattgccggaaatgccgcgatacagatcaaaatagcaacaccgagaatccctaccgtatttttcagcagtaaagaggcgctgattactgtatctgttgcgtctgtaaacattcggccaagcacaggaataaaatttccggttataaatttagccgtcctgagcgtaatgccgtctgtcactgcagctgaggctccctgaacagagatgacgccgagaaagatggtaagaaaaacagccagcgctccgatagcgatatttctgagcaggttagccagctgcgttactttgtattgttcggtcatggtgctgacaatgctcagaatcgctgataagaaaatcagcggcatgacgatattctgaatcaagagaccgctcgtgttcatcaggaagaggataacaggatgaaagaaggcagcagatacagctccgcctgaggaagccaaaagcgccaagaggagcggaatgagcgccaggataaagctggtcatcgtctgaatcgcctcagttgcatagttaattgccacatgaaagctattaagcgcaaggataatcagcaccatgtacacaattgagtaagcgaccttactgacggtgctttgctgaaaagcattttgcagaagctgcagaatgacgcaaaaaatcgtgagcaaaatcaatgtgcccagcagctttccgttggcaagcacttcatgaaacaaataagaaaagagagctttcagccattcttgcggtgagaatgatttatcgccattgataaactccattaagctgcctttttggctttccggcagcagtccgccgtattctgtcataatgtcattccaaaattccccgatcttatctgtttcaagcgaggctgctgtcctttccgctaattgctcagctgtttcagcatggtcttccgtttgttctgcattaccagctgcttgtacaatttctgcacggcctgctatgatcagcacggccaaaagcaaaacccattgaaagcgcttcaatctaccgcctcctttcggttatgacatagaaggtataagtccgagaatcgtttcgataatgacggttaaaataggcacagccataacgagaattaaaatttttcccgccaattctattttcgaggcgatggccccttggccggcatcttttgtgagctgcgccccgaattcagcaatataggcgattccgataatctttaaaatggtttcaacatagaccatgttgacatttgcattaatcgcaattttttctatcattcgaataatgtcgtagatttggtctactaaataaagaaaaatggcacatccggcaaaaacgacgattaaaaacgcaaaagtcggcttttgttcttttacaattaaagaaaggaaggtggcgatcagccctaaacctacaatttgaacaatgtcaatctgcaagcccccctatccttggaataaaaacacagcttttatctttttaaataggtcatctacaatcgtggcgaccataaataaaatatagataaaacctaacagcgtcacccactgagcgtattctttcttgcccatctgatccaatatcgtgtgtaaaaaagcgaccacgattcctactccggcaatttgaaatatgacattcacgtctactcccattttatttttgctcccctcacgtttacatcaatagaagaatgagtaacaagcccgctaaaaagcccaaactttttatcattttttcatttttcgcttgcgcctgctcagcatccgcttcagaggcttccaaatgtgtcagcgccagcttgatgtgcttttgctgagagattcgatcatgaatcccgagcgtctcgccaaactgcttcagcacttcgtattcgctttttttcaaagacagggtgtcccataccttctttaagctttgctcccacgccgttttcgcggaatcacttcccttgtccagctgatcactgaatgcggaaaaaagagctgaaacaggctgtgcgagctgtttggcaatctgctgtgaagcagtatgaagcggtgtatggccgtacatgatttcagcctcgagggattgaagcgccgcacgcagctggcggatttgccgcggccgttctgtataaatcttcgccatctcaaaacctgtccatgttgtcgctaccacaataaatacagcgcccagcagcttcagcatgttttcacgcccgtcgtcctagacagcacatttccgtctttgtcataaatttggctcactgtgcccggcccttttgctcttgataattccaaatagcggtcaaaggctctttcttcccacaaacgcttcaatgaaggccgcttcatcaggtcggatatgctccagccatgcgccgatacaattactgaaacaccagcatgcagtgcctccagaagtgcatctgtatcttccatacgcccgatttcatcgacaatcatcacctcagggctcatggatcgaatcatcatcatcagcccttcagcttttggacaggcgtctaacacgtcaattctctgaccaaattgatgttgcggaatgccgcgaagacatccggcaatttctgaccgttcatcgacgattcctgtctttacgggcagcatgggttttttgccggtgcttgagagcctcgcaaggtcccggagaagtgttgttttgccggtttggggcggtccgataatcagcgtattcagccagctgtcttgatataagtatggaagcagcggctccgcaatccccagcttttcccgggcaattcgtatattaaaagatgcgatgtcacggaggcctttcacacctccgttttccgtaatgactctgcccgccagtccgactctgtggccgcctctgatcgtgacataccctttcttcagctcttcttcaagagtatacatactatagttgctaagccggctcaggatcagatgggcatcctctgccgtgcccgcataggacaaataaacaggttgtcctcttcgaatcaattcaacagggcggttgatccgaattctgacttcttcgatttccagccattgttgttccggtatttcagaaagggcgtttttcatggattcggggagaacctcagcgatttcattcaacagagcctcctcctttctaccgattggcttctttaaaatgtatgatgtgaggcagactttatgacaagcctctctttatttatgaacacccgccaaaatcaaaacaacacccgtaaaaatcagaatcagctttgcatacgaaagctgcccggcaatttggtagattccgacagtcatcgtaatgataaaaatcaacggaccgacaatagcgagaatgctgttaaccacaaccgccttccggacatcgttggtcacaagcatgacaattgctgccgtcagctcaatcatagaggataaaactcgtaatcccgccattgttaaaacagtagaattgatatttccaagtaaaaatttcatagcactctcccaacctcccatttttttatatgatatgctctagcttggtgaagtagtcttgtcattttcgtataaaagaaagattctgtttttgggcacaaaaaaagcctgctcccatttgggaacagacttctttttttctttctatgctcttgaaacgtaagaaccgtctgatgtattgacaacaagtgtgtcgccttcattcacaaagaacggcacgtttacaacaagcccggtttcagttttcgcaggttttgtaccgcctgacgctgtatcacctttaataccaggttcagtttcaacaactttcagctcaactgtgtttggaagttcgataccaagtgtttcatcctggtacatcatgatatgcacagacatgttttctagcaggtattttaattcttcttcgatttgagttgcgctcagttcaagctgctcataagaagaagtatccataaatacgtgctgatctccgtttgcatatagatattgcattgttttggtttcgatttgcgctttcgctactttttcaccagcgcggaatgttttttcctgaatggcgccagtgcgaaggttgcggagtttagagcggacaaatgccgcaccttttccaggttttacgtgctggaagtcaacgacgcgccaaatgccgccatctacttcaattgttaatcctgtacggaaatcgttaactgaaatcatgtttaatgtcctcctatattccaatcacaaaataataagttcttttggggaatgggtgattgtccggttgccgttttctgtaatcacgatgtcatcttcaatgcggacaccgcctgtttctggtatgtaaatgcccggctccactgtgaccaccatacccggttcaaggatagctgaagatctgacggataatcccggagattcatgaacttccatgccgagcccgtgcccggttgaatggccgaaatagtcaccgtagccttttacagcaatatgatcccttgtgagggcgtcagcctcttttcctgtcattcccggcttaatatgtgcgacgccaagcgcctgagcatcaaatacaacctgatagatctccttcaattgatcactgggctgacctacagcgaccgtccgggtaatatcagaacaatatcctttataataagcgccaaaatcaagcgtaacaaggtctccgctttcaatcagtttgtcactggccacaccgtgcggaaggcttgaacgaaggcctgaggcgacaatcatatcaaaagaagagctgtctgctccctggcttctcatataaaactccagctcattggcaacagcgatttcagaaataccgggtttcataaacgtcaagatatgtctgaaggcatcatctgcaatcttcgcagcttcctctaatatcttaatctcttcactagacttaatcaagcgcaacttttccacggattcagccacaggcactaattcggcatcactgataacggcgctgtatgaagcgtaagtgccatatgtcatgctgttctgttcaaagccgagacgcttgatgccaaacgattcaacagtgtcggcagtggtctgaatcaagctgccaccatgttcaatgatctcaaaaccctttacctgaaccttcgcctgctcagtataacgaaaatccgtaataaacgctgctttgtcacccgatataacagccaaacccgccgaacctgtaaaccctgtcatatagcgtacattcgtgctgcttgtaatcagcatgccgtcaattcccagctgtccaaacaggtttcttaatttctctagcttcatcttgattctcccccttgctggcttaataagtagcgaacagcaagcttgtagccttcagctccaagaccgacaatctgccctttcgcaacaggagcgataaccgactgatgcctgaattcttccctggcgtataagtttgataaatgcacctctaccacaggaagactgatgcttgaaacagcatccctgatcgcatagctgtaatgactcagggcgccggggttcagaacaatcccgctgtattgctcctcagcctcatgtatcgcatctatcaaatcaccttcgtgattagactggaagaaagtgagctggatatgtaaggcttcagcaaactgaaaaagatctgtttcaatatcggtcagtgtctggcggccgaatacttcaggctcacgactcccaagccggttaacattcggtccgttcaaaatcaaaaaatgaggcacataatctctcctttttgcgagggtttctcatgtaaaaaatgttcacttctcgtgaacattttatcatactggaaaaggattatacactattctctatgcattcccagcgcacgtgcaagcttttccgaattcagctcattgtattcaaatgaaatggaatacccgacaaacagcccgtaaagcaaataaatgcaaatggtcgtaataattgtatctgatgtcagttcggtcaccgtgcgcacatctggaaaaatcggattaaaaacaaaaaacacgagcagccaaagcaccaagccgtataaaatacccggccacattgtttttaaacgtttcaatagaagaaaataaagaaatgctgcgccaattgaaattactccaatcaaaatgatgctgattaccgttcccagcccatgttttttccactctccgagcacaaacggctgcaatatcatattcgggctgatttcggaaaaatgaaacaaatatgcgatataagcaacgaaactccaaagtacgcctccgcaaaaacctgttgccgccaccctgccggccattgaaacaggcggcttttgcttctcattcaattcttcattttgttctgtatctttttcgcttgtcatcatggcacctccagttaaagtgtgcccaaaaaaagaaatgtcaataaaaaagctcacactttttgacagctgcgagtaaaatttgaaaataacgggtataatgcatgtagaaaaagcaaggctatggcaattttttcagcttgtcaatctagaggtttagcgctgtttcctgtacaatagagtgaaaggaaatggttagcaatcctaaagaaataggcaggttgataatatgtcaaaacataaagttccgcccgcttacggcgggcaggctgttgtggaaggcgttatgtttggcggaaagcatcattacgttacagccatcagaagaacggatggaagcattgacttttttaagcttccacgcaaacacaacccgaaactgaacatcgtgaaaaagatcccgtttttacgggggatcgcggccattatcgaagcgagtgcaaacggcacaaagcatttgaatttttcaagcgaacgttacgggctcgatccatctgaagacgagacacttgagcaggaagaaaaaaaatcctccgggctgtctatgtatctcagcctcgcagttataggcgtcctatcatttttgttcagtaaattcgtatttacattggttccagttttcttagctgaactgacaaggccgattttttcctcggacacggcgcaaatcgcggttgaaagcctgtttaagttgattttgctgctcggttacatctattttttgtccatgacaccgcttattaaaagagtgtttcaatatcatggagccgaacataaagtcataaactgttatgaacagaatttgccaattactgtggagaacgtccaaaaccaatctcggcttcattaccgctgcggatcaagctttattttatttacgattattgtcggcatgtttgtttatttactcgttccgacagatccgctttggctgcgtgttatagatcgtgtcgcactgataccggtcgtgcttggtatatcctttgaagttctgcagctgaccaacaaagtgcgtgacattcccggtctgaaattacttgggtacccgggactgtggcttcagctgttaaccacaaaggaacctaaggatgaacaggttgaagttgccatcgaaagctttaacgaacttctcagactcgaagcattgtctgagcaaaatcagaagccttctcacaacgtcatctaaaatccgttgccctgctattactttcggaggtggacagttatgaatcatcgtgtacaacctattattgctgtattaattgcgctgggagcgttcggtttcctctatgtgctggtaaccaatcccggagaaatggcaaaaatggcggtaaccgtcatcgtggcaggtatcattatttattttattgtgaaatatgtaatgaatcgaaatgcgggcagcgaaggagcagccttcaaaaaagcggcgaaacaatcgcggcgccggatgaaagaacataaagcaaaacaccgcgccggacataagggacgtgtcagccacctgcgaagcgttccgagcgccagcaagcctaagccgatgattctcaagaaaaaaagccagactcagctgactgttatagaagggaaaaaaaataaaaagaaaaacagagcgcttttttaataggtccactgctttaaaaacagctctgtccgtcttttacctagctcaatcagggctagttttttttgttgtgttaaatgaaaatcagttgccattacgccatcaaccgggagaaaaatgatattttgttcatagcgtgatgcaatgtgccttgcgtcatgggcatccttcatcgtttcaaacagggcgccgaacagttcaaaagcgttgcggatattttttttcggacgctctctttcacgcggcgcaagcgtcacaccgatcacagggcgctttctttcctttgaaaacagccagatggggaaattgcttaacacacctccgtcgacaaccgtggcggtgcctgtgtccgtttttaattttatcggttcaaaaaaatacggaatgctgcagctcattctgaccgctctggcaaccgggaacatatcgggatttaacccgtaacgggccaaatcgtccggcaaaacaatcatggtgccgtttgtcagatcagaagcaataaggcgcagagaccctttctgcaaatcgccgaaaacccttatgcctttcgctcttaacagatcagcaatccattcttctatcgtatcgcctttgtataagccaagacgccagtagatggacacccactggagcatttttaaggggagaaaagagtacctttgatccagcaatttctctccgtccacttcttcaattaaagcgtggatttccttactggtgtaacctgacgcaatgaaagcggcaataatggcgcccgcgcttgtacccgcaacccttttaaagcggaagcctttttcctcaagcgcttcataagcgcctgcaagcgcaatgccttttactcctccgccggaaaacacaccgtcaatatacatctcattccctccccctccatccgatcgtttattaccattttaagaaaacacgcgcagaaatagaccaactaatgacgggtggcgtcagcgtatcaaaaaagacggcctccttcgagaccgcctttttactgattatgatgttctgttttcttttggattgatttcagatcttttttacgggcatcatcttcttcaaaatattgaacaagatccccgatgcgatcaatactgttccagcttaaatgatgttcgattccttcgacatcgttatatattttctcttcatcaacaccaatgattcttaaaaactgctcaagcaattcatgtctgtataccagccgtttgcctatttttttccctttagacgttaacacgagaccgcgatatttttcataaattaaatattcgtctttatctagtttttgaaccatttttgttacagaggagggatggactgccaatgcttccgcgatatcggaaactcgtgcatatcctttttcttcaatcagcatataaatctgttcaatataatcttccatacttggtgttgtcatcgaaaccctcccaaaaagcaccttaactttataaaccattacaagtttacactaatgaacttgaaaaaacaaggatgctccgcgggtcaaaagccctgtttaccgcttataattccattcatctgaagcgtactttgtttcagccaagtgatgaacaaaatcaagctcttcctgagaaagttcatatggctccaaatgaatgttaagacctgtttcaaatccttctttaaaggctttacgagcctcatccatcgtcacccgcttttcggtgagttcattaatggcaaccgctttgtttttgaaattgcgctgcatccgctctcttactctttcacttggatataagaacagatcgaacagcttgtcctcatctaaatcaagaagaatggagccatgctgaagaatcacacctttttgtctcgtttgcgcgcttcccgccaccttgcgcccctcaaccactagttcataccacgaaggcgcgtcaaaacaaacagatgaccgcggattttttaagctttctttttctttttcagttctcgggatggcaaagtaagcgtccagaccgagatttctaaagccttgaagtatgccttctgaaataacccggtaagcctcagtaacagtcgccggcatctcggggtgctcttccgaaacaattacgctgtatgtcagttcctgatcgtgcagcacacctctcccgccggtcgggcgtctgacgaatccgagattatatttatgtactgcttcaaaattgatttcctttttaatattttgaaaataccctacagaaagtgtcgccggattccagccgtaaaaacggataaccggggggattttcttttcgctgtgccaatataaaagcgcttcatcaagcgccatattgaatgcaggacttgcattgcctgagtctataaaccgccaagtttctttttgcattttaagaccttccttaccgttttaatagaatcagtttatcaaactgtcgggaaaatgaaaaatattttagttccattatagatgacaatcacgctgtgctttactataatagtatttgtcgaaaacggctctatgaccttgttttatgaagcagggttttgattttatatgctaaaggagtagaatcacattgtctaatatgatcgttttgattatttttgctgcgtttatcatctatatgattgcttcatatgtctatcagcagcgaattatgaaaacacttaccgaagaagaattccgcgcgggttaccgcaaagcgcagcttattgacgttcgtgagccaaatgagtttgagggcggacatattttaggcgcccgcaacatcccgctttcccagctgaaacagagaaaaaatgagatccgtacggacaagcctgtttacctgtactgccaaaacagtgtccgcagcggacgcgcggcacaaaccctgcgcaaaaacggctgcactgagatttacaacctaaaaggcggctttaaaaaatggggcggaaagattaaagcgaagaaataaagcaaacagctgtctggtagacagctgtttttatttatctttctaccgcctcgtatctgagcaccgggtgtctcgccgcttttgtttcatccattctttttacaatcgttgtatgcggggcctcctgaacaagttccggattctcctccgcttcttttgcgatttgaatcatagcatcaataaacgcgtccagtgtttcctttgattcggtctctgtcggctcgatcatgatgcattcttcaacattaagcgggaaataaatcgtcggcggatgatagccgaaatcaagcagccgttttgcaatatcaagcgtacgcactcccagctttttctgccgcttccctgataatacaaattcatgcttgcaatggcggtcaaacggaagatcgtaataaggcgcgagttttctcatcatataattggcgtttaacactgcgttctcagtaacagcctttaatccgtcaggccccatggagcgaatatacgtatacgctctcacattaatgccaaagttgccgtaatacggcttcacacggccgatcgcatgagggcggtcataatcaaacgtaaagcgcccttcttttttgactaaaactggctttggcaaataaggaatcagatcttgttttacgccgacagggcctgagccggggcctccgccgccatgagggcctgtgaatgttttatgcaggttgaggtgcaccacgtcaaatcccatatcaccaggtctcgccttgcttaaaacggcatttaaattagcgccgtcataatacagtttcccccccgcttggtgtacaatttccgccatctctgtaatctgctcctcaaacaagccgagcgtgttcggattcgtcagcataagagctgcagtttcttcattcactgctctttttaaatcctctaaatcaacaagccctttttcattcgatttcaccgtaacggtttcaaagcctgctactgttgctgatgcaggattcgtcccatgcgcggaatcagggacaatgaccttcgtccgcttgaaatccccgcgagcttcatgataggcacggatcatcatcagccccgtccattcgccgtgcgctccggcagcaggctgaagcgtaacctcatccattcccgttatttcttcaaggtgtttgcttaaatcatataaaagctctaatgcgccttgcaccgtgtcttcatcctgaagaggatgaatcgcagcaaaaccaggaatacgtgcgattttttcattgattttcggattatatttcatcgtgcaagaaccaagaggataaaaaccggaatccaccccgtgattgcgtttggacagcgctgtataatggcgcatgatgtccagctctgaaacctccggcagcgctgcgtcttcgtcacgaatataggtgtctgacaagaggtcccccaattcgatttccggtacatcgagctccggcagactatagccgattcggccttctcttgaaagttcaaaaataagtgcctggtcctgattactcatggcgatcccccaattcctgaatgagtgcgtcaatttcttcttttgttctcagctccgttacagcaatcagcatatggcagtccagctccggatacgtcaacccaagatcatatccgccaatcatgccttttgccagcaaacgcttgttcacagctctcaccggctcatccagtttgatgacaaattcattaaacatcggcccgtcaaacataacagtaaggcctgctttttttgcttcttgctttgcatagttggcttttaagagattttggcgggctatatcttttacgccgttttttccgagagcagtcatggccactgatgctgcaagcgcatttaaagcttggttcgagcatatatttgatgttgctttatcccggcggatatgctgctccctggcttgcagggtaagcacaaagcctctttttccgttttcgtcttccgtttgtccgacgagacggcccggcacctttctcattaattttttagtaacggcaaaaaagccgcaatgcgggccgccgtatgctgaaggaatgccgaaaggctgcgcatcaccgacgacgatatcagactgaaacttgcccggcggagtgagaagacctagcgccagcgggttagctgaaacaataaacatggatttcccttgatgagcgataggctcaatatcctttagcggctcgatcctgccgaaaaaattcgggtactgaacgatcactgcggctgtgttctcgcaaacggtttggcgcaatgcatcaagatccgtaacgccatccgcagcgggtacttcaacaacatcaatatactgaccttttgcgtacgttttcagcacctctcgcgattcaggatgcacggtttttgacacaacaatttttttctttttcgtgtggcctgaagcaagcattgctgcttctgccaaggctgttccgccgtcatacatcgaggagttggcgatatccatgcctgtcagttcacagatcatcgtttggaattcaaaaatagcctggagctctccttgtgaaatctctggctgataaggcgtatatgcggtataaaactcagagcgcgaaatgacatgatccacaatgacaggctgatagtggtcatatacacccgctcctaagaaagaagcgtattgtacggtatcacgatttttagaggccagctttgtcagttctcttgttaattctgtttctgatttcgcttttttgatttgatactcttttttatatttgacgttttccggtatatcagcaaataaatcatcgatgctgcttacgccgatagtagcaagcatctcctgtttatccttttctgttgcgggcaaataacggtgcttcatgtgttgtctcctctctccaagaaaaaatattagcgtttataaaatggtgttttgacaacctttgctttcactaattttttgcgaatctctacatctacaacagtcccgatctcacttgtttccgaatcaattaaggcaaggccgacgtttttccctaatgtcggtgactgcgtgccggttgtcacctttccgacagacttgccattttggaaaacctcatatccgtgccgcggtatccctttttcaatcatttcgagaccgacaagtttgcgcttcgctccgttttctttttgttcactcaatactgacttaccgaaaaagtcagactccttattgtgctttacagcaaagcctatacctgcttcaatcggtgtaatatcccgggtcagctcctgaccgtagagcgggagcttcgcttcaaaccggagtgtatcacgtgcaccaagaccgcatggaatcaatccgtatgcatcccctgcatcgatgatttttttccaaatatgcatagcatcatcactgcggcagtaaatttcatacccgtcttctcccgtatagccagtgcgtgaaataagtgctttgcggccgctgatatcggcttcatcaataaacgcaaacggctttaatgcagacacatctgcatctgtcagattttttaagaccgcttctgctttcggtccctgtacagccaagagcgcgatttgatctgactggttgtcaatctgtacatcacctgctgcatgttctttcatccaagccaagtctttatctatattagaagcattaatgacaagcagatagcggttctcttctttttgatagataagcaaatcatcgacggttccgccatccgggtaacacatcgctgtatattgagcacggcctggcgttaacgcggaaacatcatttgtcatcaatctttgcaaaaaagacagactgtcgttccctgacacttcgacttctcccatatgagatacatcaaacaaaccggctgcagttcggacagcctcgtgttctttttttatagaagaaaattgaacaggaagctcccagcctccaaaatcaatcgtttttcctccatattccttatacaggtcaaataacggcgttctgttcagcatctaattcctcccctttatcaacggcgcagctaaaaacatacaaaaaaggacagagaaacacctcatgtaaaatgaaggttctctgtcctggcacctgaaagtttactttgcatacgcaaagacgtcccctttggtggtttgcgcatccgcacaaacactctccagagttgcgtcgagcaagagttcttttgcctgagagattcactccgcagtttgctccttcggcgcctgtatcccgaggttttcggtcaggtctctccccttgctgtcattcgctcatattttcatgctgttatggacatactatagcaatatcttacatcaaatacatactcatatcctaccatcatcactatatgctgggcaacagcaatttgggcagatttttcttatattattcatcttaagaatcgaagaattagaaaggcggtttcaaagcaatgaatacagaaatgatctacgatgcaaaatggcctgaagaatttgctgaaagactgaaaaacgatggcccttgggcaaactgggaactgtacaagctctctgcagaaatccagaaaacattagcaattccagattttgaaggcttacgggctcctttatatctgccttcctttacgccgctcccccaccagcttgaagtggcgcaaaaagtggttgaaaaaatgaacgggaaagcgattttagcagatgaggttggtctcgggaaaacggtggaagccggtttaattttaaaagaatatatgattcgcggattagcaaaaaaaattttgatccttgtgcccgcttcccttgtgtcacagtgggtcaaagagcttcaggaaaaatttttgattccggctgttgaacaaaagaaaagctatgtgtgggagcaatgcgatattgtcgtctcatcaatagacaccgcgaagcgctcgccccatcgagaaatcgttctgtctatcccatatgatcttgtcattattgatgaggcacacaaactgaaaaatagcaaaacgaagaactatgaatttgtccggaatctcgtaaaaaaatattgcctgcttcttaccgcgacgccaatccagaaccgtatcgaagagattttcaatttggtgtccttattaaaacccggccatttaggcagtcagaatcactttcaggaggagttcgccaagaagaaatccagtttagaagcgcatgaacatttaaaagatcttgtgaataaagtcatgatccgtaacaggcggcatgatacagggctgaattggaaacagcgccatgttgaaacagtgccgattcaattttctccatcagagcaggcgctttatgatgaaatttctcgcttgaaggaaagtatcaataaaccagccagcatgttctcgattatgaccttgcaaagagaatgctgttcgagcagagaagcggtgtatatgacgctgaaaaagatgctagatcaaaaagagaaacaagcacctgccattgatgaggatacgatttcagttttaatagatcgcatcaatcaagtgacacaaaactctaaagcgcttcaagtcgttgatttgatcaaaaaaatcgacgataaggtcatcatttttacagaataccgtgcaacccagatttatttgcagtggtttcttcagcaaaacggcatcagttctgtgccgtttagaggcggatttaaacgtgggaaaaaagactggatgaaggatcttttccgcgggaaaatccaagtccttattgcaactgaagcaggcggtgagggaattaacctgcaattttgcaatcatatgatcaactatgacctgccatggaacccgatgcgacttgagcaaagaatcggaagaattcacagactcgggcaggagcgtgacgtgcatatttataacatggcgacaaaacatacggtggaagagcatattctaaagcttttatatgaaaaaattcatttgtttgaaaaagtggtcggtgaacttgatgatattttaacgaaaattcaagtgaacaattttgaagagcatctgcatgacattttgtatcactcagcaacagaagaagaaatgaaaataaaaatggataacttaacctcatttttgtcttataaaaaacagcagcctgctgaaaaaagaggatcttagcctgtaaggaggttttattagtgagacagcaagaggttcacgattttctgctgcgtttttttcaagcaaacagctgccaaatcgtcgatcaaggcttaggctatatgacagtgcagcttacagttgaaatggacaaacaaatcatgaaccgccctttctactggcattggcgcgagaagacaggcggtgatccgaatccaatgaaaatcacttttattacagataaagaaaatgcgccaaaagacctagatggtgaatttatatattttggggccccgcgtctttttcaaatatttaaagctgttaaacaaaatgggagatttaccagaatgtatgagaaaattgaatcagccggagctaaagtcccacttcagccttggcttggtataaatgtcacgatttcataccagtccgacatgaaaaaggataagttattgtcactaggtcttcacctagtctctggaacgataattgaagattttcaaagcaagctgacccagttttcactgacgtctcaaatatgtgactattgcttcaccatttcacctatgatcaaaccagaaagcggacttaagcgtatggaaaactatatttccaaatccgctatgcaggagccatccgactgggcggaacaggcggttaacaggtggaagaatgatatgacattgcttgataagttttacgagcatatagaagaaaaaccagaagaataccatctagaaaaacaggcgctgaaaaccttgtatcaaccaaagatatcagttgaaattgaaaatggcggattgttttatctgcaaaataatatttcaagctaacttttttaccattcgacatcattctcgttttttttgagaaaatacgattataataaaggtatattggaaaaaaattctggtgatttaatggcaaatgacttccagagactaatgaagcatacaataagtcatggccggactggctgaaatacataaacaagtattttaggaggagaaactgcatgaagaatgcaaaacaagagcactttgaattggatcaagaatgggttgaattaatggtggaagccaaagaggcaaatatcagcccggaagaaatacgaaaatatttacttttaaacaaaaagtctgctcatcctggtccggcagccagaagtcataccgtaaatcctttctgaatgtgctataatatcacaaggaaggtgatgacattgattggccagcgtattaaacaataccgtaaagaaaaaggctactcactatcagaactagctgaaaaagctggggtagcgaagtcttatttaagctcaatagaacgaaatctacaaacgaacccctccattcaatttctcgaaaaagtctccgctgttctggacgtctcggttcatactttgctcgatgagaaacatgaaaccgaatacgatggtcaattagatagtgaatgggagaaattggttcgcgatgcgatgacatccggggtatcgaaaaaacaatttcgtgaatttttagattatcaaaaatggagaaaatcccaaaaagaggagtagtgcctgagcagaggcactaactcctcttttgtcaataaccatcgagacggcccagtatatgaatactgggccgtctctttttatggctgttattaatttttatcctcgctgtgcgctttttcattttctttcacataaccgtctttatcagtatggtcctttttgattgtcaagccgttccactgtgtagcttcgaacgagaattgaagcttaatggagttgccttgatatttattttgaaccataagcccgttttcatcttttgttttatcatctttgaattggatttccatttgaacctgatcgaagtcagttggtgtttttggaacaccatcatattcaggagcggttttaccgtcaattgttgctacattgactttaccgcttgcatttaagaatttagggtcaatttgttttttgattttttcagtagccgctgcatcatttttagcagacatcaaatacaagtctttaaggttcgcatcatctaaaataatgtttttcgggtaaccattgccgccctcttttccaactgtcaacaatgtcacttcaaactggctgaggaaatcttctggagatgtattgctgccgccgtttgctttaaaatctccataattaagcgccattaaaacttctttgatcgcaagtgatccgttattttcaaattggaaatcctttgtcaacttatctcccggctttagatttgataagttcacactcgctgaattctctttagcagataaatcaagcgtacctgatgcaaaagtagcatcctttgatttaatgtcgttaaatgctgcccatgttcctcctccaactaaagctaatcctagtgctgcagaagcaactcctaaactcaatttctttttcatacccatggtaaactccccttttattgaatgattttatatcgaaacctgttgccaggtttacaactgaagttaagtagacatggtgctgtcctttgtatctgtttccaaggcttttgtctttctttcaatttctctaatggcgctgctgatcgtcacaaaagcgtacactaacagcatcacgccgggaacaatcaataatacagccgttccaatcggctggctggcaaaatgaagcatatagcctgcatatggaagctgaaaacctgtgtattgtgcgcgaacattttcgtccgatacaggcgctgaatcagctgctgcattattatcaccttttgttttaaataacaaatggtctccttgctttgttatgtcaacaattctgtgggtgacagccgtatttgcatcctgcataaatgtaataacgtcacctttttgaagctctttcacatcagcgatttcttttaccaatattaaggaacctgtattgaactccggctccatcgaacctgacagaactgatttcagcgtatacccaaacaccgccggctctcccccggatgaacgtgttgaaatcacgacaagtgtcagcacaataataagagtaaagatgatcacgtataaaatattactgatcagcttcattgcttttttcatcctcttccccgctttccttctggtctgattgagtttcattttctttggttacagcttcttgagatgtttcttctttcattgttttttcctgtatatccttttgtgttgtttcattctcctttttgacgtccgactttgtttcttttttagggactgtcggtttttcatcgcattttgcaagcgtcataggctcggaccactcaaatgtactgccgtttgccgggtagcctgccggtttatatactttaaatgcataaatgccgggtttcatttttttcttcgtctcaattttataaagtgaatcgccgatttgattggagacaaatcctttttcgatcacgttcccatcctttaacggtttgcgggcattttcaagcttatgaagctcccacttccactttgatttcttaagtttctcacctgtattttcgagcacagcaaataaggcgaaaggtgagcatacagtgcctttcgtatccgtttgatctgatatgtgcaaatcactttgatcccagcgtttatcataatggcagtttttatctgtatgctgaaagtctttacacgtttgaagtgagacatcaaatgtttcaatatcatgaaaagcagcgcttgtatcatcggaaaattgtaagcatattgcggcagtcagactgaaaatgactgaaagctgaaagataagcagaactttcagtttcgtcttcgccttttgctgattgtgaaacaatcgaaacatatcttacctcctgtaaaacactgtaacttgatatgacaatcgttctctttaaagaactccacaaatagagtataatcaacgatttatagatttaaaaacaccgaaatcgctcatttcgttcgtttaaaagaatgttttcatcatattacaaagtcttgctcagtattgctcattttttcaattttttagaaatttttgggattgttatgtgagaatttaaatgcatatcccattattatttggtaataataaacaaagaaagggtgacagcatgatgatcaaacaatatgtgatttgtctatctcttctcgtctttggcaccacagccgctcacgcagaagaaacaccgcttgtaaccgcccgccacatgtccaaatgggaagagattgctgtaaaagaagcaaaaaaaaggtacccgctcgcacaggtactgttcaaacaaaaagtatgggaccgtaaaagaaaagatgaagcagtgaagcaataccatttaactctgagggaagggtcaaaagaattcggcgtttttgtaacgatttcatttgatccttatagccaaaaggtcaataaaattgccatattagaagaatatcaataaggtcctccattttttgaaggaccttattcatttatttgcggttattttttccgtttcagccaaagtcggaagccatagggtaaaataccgaaccactgctgggaagcaggcgtttttgtttctttccacacctcttttcgttcttttcgctcatctctcggagtatctatatatttgacaaattgctgcgtcatatatttaacataatcattcgttttcacgtgatcacctcatcattcaattattatgagtgttgtctcacatgactttttttataccctttacactgttttattctgtccatctcagcagctttttctgtttttggtcaaacacgatctgtgcagttctttctgttcccgactccgttgacactcttaagttgatttctttttgttcttttatcgatgtatcatgaatgtaataagaaacccgtccatatggaaattgctgcgtaccctcctggcctttccgttcctctagaacatgccgaatcgaaagaagcaccccattttgaagcaaattctctcctatgtataactcttttgtttccttctcaaacatgcagcgtgaaatatattgagcagcagcaaagttcacgattaacagcacaagcgctgacacaaaaagaacagctgggtaaataaaccctcttgtacaatacattcacccccctcctaaatacgaatagactggaaaagcagtttgatacactttttggtcctcactctcaattttcagcaaaacaacacaattttcaaaatcagctttcatggcagtaatatgatctaaaatcggaacatgccctttaccatccactctttttcttatcattgaatgataaatttcgaaacggatgtcctgcccggaaagattggtgcagattaacacgctcccatgctcggctgtcttaactgcctgtgactccttgcattcattcatcatctgttctatcgaaatcatccattcttgctgtgtgaaaccgtcatgttcctgctgtcgagacaaaaacagatggaaaatcgcagctaacgatcctgatatgagcaaaaagactgagagcgaaaataatacgttaagaagcgtatagccattctgtctgcaggatgctgaggcaatatgatttctctttataagctgtggctttgatacatacgttttgatattcgccctcctcctcccacttcattgcatagatatgattgttctttgtaattgtttttgacgcggctccttcaccactcatgacatatttgctaatgctctcattcatcatctgatagccgatttctcgtgattccgccattttttcatcagctatcagcttgtcccacaaggggacgactgtcagcagcacaaacagccacaggcttagcgcagacattgtttctattgtagaaaaacctttattttctctccacattgactctcccgctccctagataaactgttatatcatatacggcatggccatttactcgtatttttccgcctgcattcgggtgccctttctcattaaattccaaacggtcttttaatgtcagcagttctatagaaagtccccttgcatacggacgttcaatgaccgtatcaccaatgactaattgatattcttttttatgaaagaaaatttttgttctttgttgacgggaaatagcaacctgctgtgtgagcataatatcatttttcagctgccttgctgcctgtcggacagctgtattgtcataagcaggaggaagtgtagtgaagacggccaccaggaggatagaggcaaggcttaacacaagcaaactttctaaaagggtaaacccctcctcctcgtttaatttaatgttcaaccttaacttctccgccggtgatgataatgcgcttaccatttggacagacagcatcgtttttcacatagccctctgactgtaaatcggcaaggctcggagtttgtccttcatgatcaagctcaaatgcagtcatttgtgccttaaccatgttttgtaagccttcacagccctttttttgaatggtttggttatgtttcgtgacgttcggtatcgtaattaaaagcaaaatcgaaataataaagagcacgattaacatttcaacaagtgtaaatcctttctcattcattagcctcttcctttcacatttgattcatcatctgatacataggcacaagcatagataaatacacaagtaagatcatcgctgcaacaaatccataaatcattggctgaaggatgcctgtccatttttgcgctttgtgttccagccgctgtaatatgaattggctgtatgtgaaaagctcccgatccaatcggccgctcagctggccgtgagatatgacttttgataaatcagtttcataaaaagggcttccacaaatagcggattcaattgactcaccggcttttagccgttcaatcaattgttcagcctcgcagcggtagaaagggagaaacgtttgatgtttaaatgcattaaggctgtcataaattgagaggcctgattttaaaaggctgcttagctgcaaagaaaaaaagtagctgttaaacagcttgacaagctttccaaccaaaggaatcctgatacaaatcagcatttgccgggcaggtgattttttcttaaacacaagccaataataaatcccgatacctgctgtaaaaagaacaagcaaaatgatcacaagatcaatatgctgaaaaaaagcaaaaagtatatcggttgaacgtgaggtttccatattcatcgattgatagataccggaaaactgaggaatgatgatggactgtaacatataaaacatgacagcgaccgtaaagatgaggaaaagcggatagcgcagcactcttttcagctggtctgcctgtgcaatttttcgttccagcagctctccgctctggatcatggaagcaggcagttcaccatgtgtttcagcaaaataacaaatacctacggcttccttatgaaatgacaaactctttagtacttgataaaacggagccccttccctcaaacaagtgaccgaatcagtcaagtcagccgcctgcctcttattcatctgaagttccatcaggcgtaatccatccagaagcgtatatccgcccgcagtcatttcaccgagcctctttaataacctcgcttgatcctttaacgaccagacttttctaatctttttcatgataaacccaccggtcatagttgtttgtcgttaaatagccgagcgcaattccttttctgataatttgacgaagcgtttgatattggtaatttgcatgatttccttttgcctcctggatacattgctgaagatttttcccgtatagaagctcataaacgctagctctcctggtatttcgtgactgtcggcaatacactgatgaacatccgttttcacaaaacgggcaagccaaatcaaccaagcgctgagccgctattgcaatgacagtctgttcgatttcattcatattgataccgaattcaagcagtctgtaaattgcgccctttgcgtctctcgtatgaaggctcgttagtaccagatgtcccgtcatcgctgcccgcaccgcaatttcagctgtttccgcgtctctgatctcacctaaaataatcatatcggggtcatggcgcaaaattgctttcagacctgcggaataagttacaccggctttttcattcacctgaacctgaagaacatcttcgtcccttgtttcaacagggtcctctaatgtgacaatatttcgattaaagtgtttttttgcatattgaacgagagagtatagtgtggtagtcttccctgaaccagttggcccggtaaaaatgagcatgccatgggaatgttttaaaaacgagagtaatgtggctcctgtcttcggaaatagcgacaatttatcaatcgaagggatattgtattggggcatcactctgatcacgaggctttcttcattaattgtgggcagcgttgacattcttaaatgaacatttccctctttcagctttaacgtaagcgaaccgttttgcggctttcgcctttcacctatatccattgctgaaagaaatttaaaatgtgaaatcagccttacgcactcttcttttttcatgtccctttttttcagcaaggcatgatcgacccgaaaatgaatgatagcgtcccgctccctcggcacaatgtgaatatcagaagcctttgttagatatgcctcttcaatcaagtttttgcttaccttttctattgaatccaatttgattccctctcctttcaacgcatattgtagaaaaagaagaaagggtaatcaaacaaggaaaacgtgattttgtgagatgttatatgctgaaaaaccaattctttctggcaagaaaaaaaattttcaactgaatgtgccgctgtcattataattttccctataaataaaaaagcagacatggtcaccatgcctgcttgattccattttcattatgctgttttcgctttttgaccagtatctttttcaacggaaaggtcgcctaatgcaacaataccggtcatttggtcattttcaagaatcgataaactgcggatttgatgctctgccataagcgccttgacatcgtatccggtcaccctgatatgtctggtgaaaaagcggggcacgctgcacaaaatatgaaacatcctatagagtccgcctttttcgaggtttctttttcttcttccgctcctgcagcatatctcccgtccagccttttttcctcaaatagagatagatcaggactgtagatgtgacaatcaataagagagaaaagagatatccgtatttccaattcagttccggcatcactgaaaagttcatcccccataaggcacccagagctgtaatcggcgtaaaaagcgtcgtgaaaatggtcagtgcttttacaatttcattccccctgtgtgaggtaatgacttcctctgaatgcagcagattgttaagctccccttcaaattcgctgatgtatgtaaatcccctgtcaattttcagttgtgtccgctgataatcctttttcccttcattttgaggtaaaaaggtttctttcaacgccatttcaatttttttggcgcttaatattaaatttttccaaatcatcagttcatggcgcaggagatggacgcggtttagaatgcttttgctattgtcgtctttaatttgccatctgagctttctcagctttacttcaaattcatcaacaccgattaaatacgcattcattagttcgccgagaagaattaaaaacccctctatcgcattgtccgctctttccatttgccggacaacttctttgcctttaatctctctcaaaatcgaaaagtcaaaattgattgtgaaaaaatattgtctggtgatataaaagtgaaaaacagtatggtctttttcttcaccaagcccctgatcataaacaatcgacccaaataccgcttcattttccgtttcagttgtatctactcgcaaaaaattaacgtgatggttattttcaaaccacttttcacactgaggccagtgagaaaaatggattagatctcttgccttacttctttcttgaggccccatttggtaccaaaaccaatcctttcctgtatgtgccttcatgtcaagatcctccaaacttttgttctttattctttaattgcccaataaccgcgtcactaaaccagtctgccgcttcaacacatgttttatgagcattttcaggtggtatggaatgtagaaagacatcggaaaagggaggtgcatgccttccttggagaaggcagttgttttggaatttatcaatttactagcagtcgctattctcattttgttaacaggattttttgttgccgtagaattttcaatcgtaaaagtgcggcgatccaaaattgatcagcttgtcgcaaaaggaaagaaaggttctaaagcggcaaagcatgtcatcactcaccttgatgaatatttatcagcctgtcagctgggcatcacagtcgcagctttaggactgggatggcttggggaaccgactgtgcaaactctgcttcgaccgctttttcataaagcaggcttaaatgaatcgcttacccacctgctttcactcgtcatcgcatttttagtggttacgtatttaaatgtcgttattggggagctggctccaaagagtttcgccattcaaaaagcagaaagcattaccttgttgttcgctaaaccgcttatttggttttataagatcatgtttccattcatttggctgttgaaccactctgcccgattgattacaggagtgtttggactgaagccggcatcagagcacgagctggcatatacagaggaagaacttcgggtcctattggctgaaagctataaaagcggcgagattagaaaaagtgaattaaagtacatgaataatatcttcacctttgataaacgaatggcaaaggaaattatggtgccgcgaaatgaaatggttagtttatcactagatgaagactccatttcaaatcttcaggaaacagtcaagcaaacaaaatatacacggtacccagttgtaagagaggataaagataacgttattggcgtgattaatatgaaagaagtgctgttttccatgctgacgaaagatttttcaatcaagaagcatcaaattgaacctttcgtacagcccgttatccatgtcattgagacgattcctatttataaactactgctgaaaatgcaaaaggaacgcactcatatggcgatcctcatcgatgaatatggcgggacgtccggtttggtcactgtcgaagatattatcgaggaaattgtaggagaaatccgtgatgaatttgatgcggatgaagtgcctcatatccgcgaacttggaaaggatcattacttgttaaatgcaaaattattaatcagcgatgttaacagcctgcttggaactgatttatcagacgctgaagtagacaccttgggcggctggtttttgacacaaaacatagacgctgagcctgaaagtaccatagaatatgatggctactcttttaaggtaaaagacatcaacagccatcacattttatttatagaagtaaaaaaagctgaatagcccgtgaaaggctgttcagctgctatctttcaagataaacatggcaaaggcatcaacactcttttattttaaaccctttattggccagggctttagcaagactttgctcggttttcacattcgaaaaatccagacccagcttcacgacagtttgggcaatttccggcctgattcctgaaataatcgtctcaatgccgagcaatttggtgctgtcaatcactttaaaaatttgataggctaccatggtatcaacgataggaacgcccgaaatatctaaaaataaatacgagagctttaacgctgagcactgctccagcacagactccaaaatcgtcctcgctctgtgcgtatcaatttcaccgacaagcggaagaatcccaattccatcagtaatcggcataatcggcgcactcaattcattaatcatttctttttgcgcgtttaattgtatcatggtcacctggtgatattcttccgtaaacacttcgatgatctcatcaatgttttgattcaagatccggctccactcataaaattcctgaatgctgatgtcttgagaagaagcttcgctgaatttatgaatccattcaaacatgatgtgcctgaaagtgttaaactggccgacactttgtgtaaccgtcacttcatgaacggcacggtctctggcgcattgaagagaccaccggttgagctcatcctctacgtcttcttttctaagggattttgctacgatggtcaccaataattcatgctggtcttttaacttttgttctagtttttgctgatctttcgctgaatacagccagctgcctgttgatgtacaaactttcagccattgttgcgtgatatcttctttgtgctctgttaagtgctgatcaagagctatcatcttaatgagctacctcctgtttttgaaaaatgtacgctatatatgtataacgcgtctgcctttacacatactatgtttagattcaatgggctatagccaagcggtaaggcaatggactttgactccgtgatcgttggttcgaatccagctagcccagtttctgaacaggtgaaaaaccgaagacaagctgattcgaataaatcagcggatcttcggtttttcatcatgcagattgatgaaccgttttcttcttcgataacttcaacagttctcccgggttataaccaatcaccagctttttgttgtctactagaatcgggcgtcgcaaaagcttcggcttctcgattaaaagttccagcacctcatttaccgtcatttcttcaatgtttaaatttaaatttttgaaagtctggcttcttgtcgccaaaatttcatcaattccttctgtcgttaacgataaaatgtactttaattcttctcttgtcggggtttctctgaataagtgccgttcgttaaattcaatttgatgtgctttaagccaatgttttgtttttcggcatgacgtgcagcttggatatgagtaaaaagttaattgttgttccattcgttttttcctcctcagttaaccatctctttgtagaataactacccggatcatttttcatttaaaccatttacagaacttttttcggattatttttttaaaaacattcatacaatagaaaacacaatcaaagggacaaattccatttgtatattaataatgaaaatgtttacatttctaggtgtgatccattataataacagtcagagggactctcgggaggggataaaaatgaatcgcatgttccgggtgttaggattttggacgggaatttttgcagtcatgttttatttaggtgatatgaaagatgcttcccttttattttttggacagacgatcttatttgtgtttctatcgtatttgaacttaaccgaacgcatgtatatttatatttttggcgcttatttaacaattttcttcgccggctttacatattactcaatttttattatggtgcccggcggcggaggccattaaatgcagaaagagacaaaccttatcggtttgtctctttttttacaatgaaaacccatttaaaaacggattttggtcctgctcagtcagtacgtctgtttcaggtccatggccgcttaacaccagcgtgtgttccggaagtgtaagcagtttttcatgaatggacgtcagcagcgtctcttgattgccgcctattaaatccgtacgtcctataccgccttggaacaagacatctccggagataaccaagtctgcatctttcacgtagtaagacacactgcctggtgaatgtcccggcgtaaataatgtttccaaatgaaacggcccgatattcaactcaccgtcgccttcaattagatgatctgcaggcttagctgttacttctatccctcgcagcatgccggagccgtttaaagaagcgtccgtaagccaatttttttcattttgatgcaggtaaacagggatatcccatttttctctcacttcatcaagcgccccaatatggtcaaaatgggcatgtgtaagcaaaatggctaaaggcgtcagccctttttcttttatgtattgattgattttatgtccctcgccgcccggatcaaaaatcaggcattgatcatcattgatgagaaaatatgcgttcgcttgaatcggccctactggcattcgtctccatttcactattatcacctctttcttttttatgctcttattatgagggttttttaaaaaagattcaaacaatcgcaatgaaaacgctatcgacaaacctataaaaaacaggtagaataaaactggaaagaattgcaggtttttcaatgtaaagggggctgtgttatgttacttgtcgtgattttcggccttgtcgctcttttcgctttatggggagtcttgcgttctgttagaaataaaaatatactcgggtttttattagccggtgccaccttatttgtctttggatggtttaccgtgatgaccgtaataaacagcgggtatccaaccgcacattaaaacctgtatccgatcggatacaggtttatttttatggctgtaaatgtttattgacactttctattttgctctcaagcgtcgtttttttgtcacgcctgtcatcgatacggatattcgttgccactctgtgcaatcctttttgaaatggcgcttcgtgaattgcctgaatgactgcaaaaaggtcactgagttctccctcgatcagcgtattcatcggtgtcagctgatatttgattttcccttctgcttgatatccttctaatatcttttgcacatcggctacgtaagcactgacactgggtgtttccgtaccgattgggataatggttacatctgcgatagccatcgttattccatctccttttgatcaatgatgagttgcttcgtttcatgtgatttcaataaaataatttgctcaaaatgaaagccgtataacgcatatttcccgttcggagatatttgaatcggctccatttcccgcagagacacaagatcttttgtctctcccgatgctacattgattgctgcgagcttatatgcatcgccgctttgtttgaatgtataaaacaggcttcctgcttcatcatagtcatactccattggagccaaacttgtatatttcgcttggagcggccatttcgctgtaacaggtgatgttgattgcggcgttttaaactgatacgtcccttttcctccggaagctgatttgacagtaaaactcatttgatggaaagaatcgaagaatagaacgttatcctcaagcttctgttccgtcttagaagctgtatcgaacgtatataaaggccctgttttatcgtctcttccctcttttacataatcaaatgtatttttggatgtccaatgaatgaacggaacctgtactgggcttaagaaagattcgtcttttttagcattcacctgatatgtatggaaatcccagttttcattgaattccgtcaccatcatttgataaggatcatactgattccaagcagcttcaagctcatacgtttcgtaatctttttcgtaaagcgtctctccttctgcattaagcaaaaccactgccgtcttttggctatgtgtgatttgcagcagaatcatctgctccctcgcattgatttgaacatcaacgatttgaccatccgtttgatagagctttttcgctttgcctgtaaagatgcggtacgcaaaaagctctgttttcgtcggattagacgcagtatataatattgtgctgttattcagccagccttccaccccatccgctttttccgcggaaagcggtatgatgtcttttttctcatcttttgccgccgatgcctgtttttgctgctgatgagatggttcgcatgccgataaactaaacagcaataccgccagcagaataaaacaaactgatctcatcagcattcccctccgatcatctttattctctcatatttgcttcggcagaaaaaagaaaaagtttcagttactcatgaaaaaataacgccctccacaagataccgcttgtggcgttatatatgtgtgaaaactgctgaaacggcaaaggattttggccttttccaagttccaccgtatacccttccttaaaataatggtgaataaaccagtcacgaaatccagcatagctatctatatcccttactcccttataaatgttcccgcttaactcctcaaaatcctttatgacggcagcagattcctcaggctcaaggcctttatagccccaataaatttcttctccttgagtatgaagagccagcagtctgtcaggcggattctccgtgatcagccggtacatcgcaatagattccggctccgtaagcggagagattcccggaaaatcgcggtagctgggtgctgtcggttttcggtatttttcaatttcccataatgatggaaattgtttatttaaatcaaccccgtttatattcgccttccattcattaaaatttggacgatgttcatttagcctttcgagttcatctcttctggctcccatgacttctgatccgtttaaaacaagatcaacgccatccggattgacaagaggaacgagggataaggatgtgctgttaaacagctttatgggagaaaagccaaagaaaggcgaattgcagcataatgacatacagtattccttaaaccattttagcaggacagacgttgtaatccactcattcgcatgaaatgacgcgttcatatggaccttttttacggcatgctccccaccagccttcagctcccagataggcctgccgagtacagaacggccaatttcccggcatgagacaaacggaaaaacatcaataatcttctttatttccttttcaacagctgaatcatcatagattttctcttgctcaatccagctatctgaaagtttcagctgccgaggctgtaaaaagcgctttatgtcctgaatggtttgaagctctttgccgctatgctcctctatcacataaccagggcaatacaattgatgtttttgtgcggagcgatttgcacttttaagcaattcctcgtctatcttcagttctttcgccacattggccaaattgttcttgatctcaggtttcacagtaataaacgccatcatcatcccccttttttgttactatatgacagcgtatttaaaaaaagaaagcctcccgctcacttcaatgcgggagacattgtgattatgatgcctgatcaagcatttgtttttctttccgctttgacgaattgtccagccttttctggtcataaaatcgcaacaaatccccataaatgatttcatcagaaagtgatagctcctgttttgctttatcagcaaatgcttcacattgttttgtctcttctaacggttttcccgtctctttgtcataacacgcaccgtctgtataaacaacctgatctgtgataaagctcccgtcccggagcaccgtgaagtccagtttttcgtctgaaagcagatcgttgccgaattgaatttgatctttcgtatcaatccctaaaagattcatcagcgtcggcctgatatcaatctgcccgcctactgtttcaatggtttgcggctttttatcagtaatacccggaatatgaatgaccagcggcactttttggagctgtacctcttcaaatggggttatttcttttcctaaaaactgccccatcgcttcattatggttttctgatataccataatggtcaccatataatacaataacagagttgtcgtataacccgtcttccttcagcttttcgataaaccgtttcagcgcctcatcctgataacgcactgtcggaaaatatttatttagcgtctggctgcttgaatcatattcatcaatcaattggtcctcttcatcaagatcaaacgggaagtggttcgtcagtgtaatcagcctcgagtaaaacggctgaggcagatttttcatcagctctgaagactgctcaaaaaattctttatccttaagtccccagccgactgaattttcgtcagttacatcatacgagttaatatcaaaaaacgaatcatatccaaatgagtcgtacattaaatcacgattccaaaagctcttattattagcgtggagcaccgctgaatagtatccgctgtttttcaaaatttcaggagcggccatatattgattgcccgcattcgtaaaaaatacggcacctcgtccaagcggatacagtgaattgtccacgataaattcagaatccgaggttttcccctggcctgtttggtggtaaacattattaaagttgtagctctgttttataaagtcattcagaaaaggcgtgatttcttctccattcaatttttcattaatcacgaagctttgcgtcgactctaaggatacgagaatgacgttccttccttttgcagcgccgaataagcgtttgttggcatccttcacattagcggttacgtagttttcaatctccgtcaggctgttgctgtctgccaacgctctctgtgcggattgctttgactgaagaacgccatcgtaaatatgaaaattaaacaggctaatgtttttaacaagcatttctctgtcaaatgagcgtgtcaatagctgaggtctttccgcctcagacaagcccaggttgaagaaataaacagaagcaacgaacaaaaaataagccgcccgttcatttttcgttgagggaatgtccgattgaaaagctttttgccggatgtgaagccatattaaaaccgcaatatctacagctaataggaggtctgtcggctcaagaagtgttccgatgctgcttccgagatcacccatattgctcgtttgaaaaagaacagggattgttaagaaatcattgtaaaaacggtaaaaaaccatatttgccagcaatacaaacgtgacaagacagctcatcgcgataatgtagcgatttctgtttttgccttttaaaaacaggctgaggccaaaaataagcaacaaaaaactcaatgggttgataaacagaataaattcctgtgttagattgtcgattttaatatgaaaactggttttgtaaacagcatacgttttcagccacatcaataaaatggcaatcagcataaatgaaatcttcgaaaaaaacgtttttcgcatttcaacctcctatgcagcacgctcaaaaaaatcagtctattcccaacattctcattaacacatcaaattaaatcttaacctgagcacaacaaaaaatcaatttcatttacacaattttaacaattttgatgtttcagccattcatttttagcgatccaagcgcctccgataacgccggcatcatttccaagtgctgcgattgaaatatcagcagcttgggctgcccgcggaaacgcgcatttgcggaatgttttctcgacttttgatctcagcagttctccggctctcgatacgccgccgccaagaacgattttggatggattaagcgagcttgccaaatttccgagcaccaaaccaagatgcttggctacataatcaaccacctcaagggcaatttcatcattttcacccgccgcttcaaacacatcccgcgctgacaattgttcggttgcttttaaacgtgtcgtctttttagcatttgctattttttcttttgcaattcttacaattccggttgctgacgcaattgtttcgatacagcccgttttgccgcagttgcagggcgctccgccttcagggatgctgcaaatatggccgatttctccgccggcgccatttataccatgtacaatttcaccatttgcaatgatgccgccgccaactcctgtgccaagcgtcacgagaatgacgtcttttgcgccatcacccgctcccttccacatttccccgagcgcagcaatattcgcgtcattttctataacagctgggatgccggtttctgtctccagatggtttttcaaagcataatttttccaccctagatttactgtttcataaaccactcctgccgccatatctacagggcctggtgcacccattccgatgtatttgatgatgtgcttcggtttttgcagctcatccagcttgctgtcgattgtttttgcaattgtgacagtaatcgtgtcgccggttttatcagtcggaacttcccacttatgctgaatttcgccatattgattaataaaagcgagtttaatcgtcgttcctcccaggtcaatgcccgcaaaccatatctcgtccatttttatcaccttagcctttataaaaatctcttccgttttttgtttgttccaattcttttcgaaggacagctgccgctctggcccactgctccttttcaatcatgtggttcatgtataattcctttaattcatccagcataaactcaatttcaagctctctgtctccaaaataaacaatgtggccaaacgtttttaacagctgctgcacatcataaaatgtattcattttcctcaccatttcttgaacttaactatcataagcgtattcataaggaagcggtcagtcaagaagaaaacgctgacaaaaaagccagcttcctttccatattccacctctatgattctttattgttttcaatttgccgctgcagctccttgtagcgctgctccttcggcttcagtttcacagccgtctggatggccttttctgcttgtgcaagctcatttttttccgcatacaataacgctaaattgtaataggaagcatggtctttaggttcttttttcactgctcgttccaaaagggaaaccgcctgatcatattcgccgatttgaatatcagaaacagcaagaattttcaaaagatcggcagaggcatctttttgcgctgcttctccgttcagcaattctgttacttcttcatactttccttcctgatacagctcgcttgcctgctgaatcagcgctgactcctggtgtgaaggcgaatgcaatccgtaatataaaaatccaacagccaaagcaatcagcaaaaccgctgacaacaatctttttccaaaggctccggctttaggcaaccccagtgctgctgcagcgaaaaagccgccaatcaagccgccgatatgtcctgaattatcaatattcgaaaccgcaaaaccaaagcccagattgatgataataatgacaataatattggttcctatagttcttaaaaacatttttcgattagacaaagcaacatacagtaatgcacctaagcatccgaatatggctcctgatgcccctgccgaaggatacgggctgaacacaaaactcgcaatcgaacccgtaatgccagcagccagataaatcagcaaaaatctccccgatccatacatccgctcaaccgctgtaccaaccgaccataaagccagcgtattaaaagctaaatgcgctatgccgatgtgaagcacgatcggtgtcagaagccgccaccattctccttgtgcaatcaggctgttttcttttgctccaaaagccaccagtgtctccgtattagtgctgcctccgtttatttcgagcaagaaaaacatcaggatctgaagcgcaataaataaatatgtaaaagtcggttttccgttttgaaaaaccgccgcttcagtttttctctgttcttcttgtttcagcactagcgaaaggaagcgttctcgcgccatttgcgcgttttcaaacgaagcgtgttcctctgaacaatcttctgtacgaaatgatggaaaaaccgcttgaagatcatctcgaagcatcgttcctctaacgatcgccggctcaactgacacagttcccttctcaaaagttttttttgcaatctcttcccagtcatcaacaggggcttccgttgaaaaaaacacattcagcagcttcatccttcgtctgcccaattgatgtctgactcgttctactcgttcggcctgctcttcgatgtctctaaccatttcttgacggaaatcaagatcgtgcttataaagacgaactagatcatgagaggacttgtccggcgcttccagccatatttcatctgactcaccggcttgtatgacgccatacccgctattcaccaggtgcgccgcaattttccaatatgtatactccagcaaaaacatgtttaccgctccaatagtttttttttcattataacagctggcgctccgaaacgcctactgaaagcaaaaaatcccgtttttcacgggattttagaaagcttgctgtataaacttattgcggataaatggaattcttaaaaacaaatggataaaagaccgcctgattcctggctggctgagtacagtattcataagacggtagcgattttgataaaacatgacggcagaaaccgcgaaaatggcatatatcaaaagttttttcatgatatccctcctgccaatagggtttgttattctgccttatttattctcgaataagggacaggaaagttatgaaaaacaagaaataatccgatcctctgttatcagcttatgtaccgggatgtcatgcggcaaacggggtacgtgcgcaaacagctggcactccaaaagcaaagagactgtctccccttcatattcacttaaatagcgatcataatagccgcctccaaagccgaccctaaacccgttaacatcaaaacaaacacctggaacgatcaccaagtcaatttgtgatgggtttacttcttttgttttttcaattaccggctcgagcagtccggcgtaaacggtttcgagctgatcatcggtcttatatgtccgaaattgcattttcttcgtgtccggatggcattttgggatgcaaacttgtttcccttcttcccaagcctgctcaatgacaggacgcgtcggtatctctaatcctctggagatggtgaccgcaatggtgccggcattttgccactccggcagagaaaacaagtacttatacatacgttccgttttttgaagcagatcttcatttgataaagcagacagtgcctccagcgtcttttttcttaattgtgatttcatctctcatccccctcggaatagaaaaaaagccagaacctttttcaaagctctggcttttttcttacacctcaaacagcaaagctgttattttgtttcacggtgtaacgtagattttttatcacgtgggcaatattttttaaattcaacgcggtctggattgttgcgtttgttctttttagaaatatagttacgctcaccacattcagtgcaagccaaagtaatattaacgcgcattattttccctccaaactaaaatcatttacttattcagacttatatataataccactataatggacggaatgctaggctgtttttcaatgaattgctgaattattgaagatacgctcataaagctgcaaatatgatgacataatgagtcgggggtggtggagcttgaacacttgttgtctgccagcttcttttatccggcgggctttttcccggtcttttaaaaagctgtccagcagatcagccgcttcctgtacgagcgtaaaattagcgatgattgccgttttgtcatgaacggcataatcacaaaaaccacccgactgagaaacgacagtcagcacaccttgttccatgctttcttgcgcggcaagcccaaacggttcataagaactagggaaaacagccatttcacattgagacagtaacgttctgatgtctttcctattgagaaacggcaggaacatgacgcgatccttcaggttatatgccgcagctaatttctcatagcaggacagagacggcccctccccagccagcactagatagaggtctggctgacgctgcttcaagatggcaaacacctttaacagctgcgaaaatcctttttccggaacgaaccttccatatgaaaagagaaatcttctatttatgcttctttggattttccccttctcttcctccatagatgcagggcttgggataacggttatttttttatgtgctgccttattaagagaccgcttcataaatgtgcttaatacgatcaatgcatcagcggattctataaggagccgttcggtcttgagcctgtatgggtgtggggcttctcggcacaccttcttcctttctctttcaagaccgtggattgtcgcagtaagcggaaggccaagccgttgtttcaaatactgggcagcaggggcagttgtgtcatcatgggcatgaatcagatcaaagcgtttattgtgtgataacacatggcgaaccattgtaaagttagcatcagctatgtaatcttcaaacttcgcatacgaaaacagctgcccgctcggagtaaaaaccgtaatgttgatatgagggtttaaataggaaatgaggcggtttaaatggacacctagcccgcttttcggctcatcgggatgttcgggtgaaagcatgagaatgttcaccgttctctctcccctctcccataacaggtgtatgcagaaaattgctcctcccacctggtgtgcgcttcctcaatctgaaagctgtttatatgacgaatcccattttcatcaagatagatgtcgtctgtatcggcaagcttgagagagacattcattgaattcacaatactgtattcagcccgatatacagcatcaccagccgtctgtctaatcgtccattcgcctttatcatacgttgtgcgttttgtcctgacagcttcaatgtcttttcttttgatgacaatccgcaattcttttatcatatcctgcgttttttcgaaaaggacagcttcagccagccgcattgtttcttctgagatttcccagcttacggtcaaggtgtgagcgttttgaatgattatgtcgaatgtgtccctaaaaaaggaaagcttatgtcgtatattatagggaaatgggtgtttatccatggactcttaacattctcctttccaatcgttcacttcgtgttcctattaaaccattacataaagaagaagcaaagaaagatttctcgacaaaatctcgtttttttcgcgaattcctttagaaactattggttttatggtataaaaaagaaggataaaaaaagaatagaaggtgatgaaacgtggaaattgctattattgcgttgtttatcgtcagtatagcgctaattgcattctcatattctcaaagagacccgatgaaagatgtagaacaggagctcgaaacactgcagctttctgcgatgcaggaaatttacaagctcaaaaagaaaatgacagtgcttgaggaagaattactggaaacaaaccttgtcattcgcaaatcaaagcagaacgacatcaatcaaaaaatcgctaaacaaatactttctaaatataataacggtatgtcagctgaagcgattgctaaagctgagcatgtatcagtggaagacgtgaatacgattatcaaagataatgagaaggtgctcgtatgacaaaacggggcattcaggcatttgctggcggcatcattttagcgacagccgttcttgcagctgttttttatctgactgacgaagatcaggccgctgctgtaaaagataataaaacagtaactgaacaagacgtgaacaattaccttgattctaaaaaaatggtttctgtgaaccgtgatgaatatcaaaaacttcttgattcaaaagagaaatcgttgaccgatgacagcagctcagacacgaaaacagacaaagtcaaaacgtacaagctcaaaattaaagatggcatgagcactgcggatgtatctgctattcttgaaaaagagggcattatctcttcggctcaagactttaatgactatgtcattgatgccggctatcacaaagaaattcgtgccggcgagtttaaagtaaaatcagacatgagtttcaaaaagatcgtaaaaacgttaacacgataaaaaaacaggctgactcagcctgttttttttcatccaaactttcctgaaatgtaatcgagagttctttggtccttcgggttagagaacattttattcgtattgtcgcattcaacaagctcgcccatgtagaaaaaggcggtttgatcagaaacccttgctgcctgctgcatgttatgcgtgacaatgacaattgtgtatttatttttcagctctagaatgagttcttcaatttttctcgttgagattggatctagtgcagatgtcggttcatccatcagcaaaatatcaggattggtcgcaagtgctctggcgatgcaaagacgctgctgctggccccctgacagcgaaagagcggacgtatgcaatcgatccttcacctcatcccataacgccacgtcttttaatgacttttccacaatttcctgaagcttcttcttatttttggtgccgtggactctcggtccgtaagccacattatcaaaaatagattgcggaaacggattccctttttggaataccattccgatattttttcgcaaatccacgatgtccactttatcctttaaaatgttgctgccattatagttcagctcacctgcaagctttacattcggcgtcatttgaatcattaaattcaatgtcttgataaaggtcgatttcccgcatccggatggcccgataatcgccgtaacctcattttcataaatgctcaaattgatattttttaaagcatgatgctgtccataccataagttcattccattgacttgatagacttcctgtttcattacagcttcggtagcaatactcattgccgccctcctatccgaatttcccgttaatataatcctctgtcttttgctttttcggactcgtgaaaatctgttcggtctgtccgtattctacaagctcgccgtttaaaaagaatgccgtccggtcagaaacccgcagagcctgctgcatattgtgcgtgacaataataattgagtattctcttttcaatcctgtaattaattcctctattttcgcatttgaaatcggatcaagcgctgaagctggttcatcaagcagaagaacagccggcttcatcgcaagcgttctcgcgatgcataaacgctgctgctggccgccggataacgagagtgcggatgaatgtaaacgatccttcacctcatcccagagggccgcttttgttaaactttcttccacaatttcatctaaaacagctttattccgctctccggcatatttcaatgcatgtgtgatattcgcatagatcgatttcggaaatggatttggtttttgaaaaaccattccgatttctcttctcaagctgacaacgttaatattgccgcccaatatatttaatccttcataaaggatttcaccttccgctcttgcagatggaattaaatcgttcattcggttaatatttctcaaaaaagtagattttccgcatcccgacggcccaattaaagcagtcaccgcatttttttcaatatccatgtttacatgatgaacggcttgtttatttccgtaaaaaatggacagatctttgacctcaagcacgtggttctgcttcggaacaataacagctcgctcaggtttttcttttaccatttgttcagacatgcttttcgcctctttccgttctaatttgccgtaagctttttgtagatcatcgtgccaagccatctcgccgcgagattaaacacaagaacagaaatcaccagcacggcagaaccaccgttggcaatcgcttcagcatccggaatcattccttgtgtattgacgttccaaatgtggaccgcaagtgtttcagcgggcctgaaaatattaagcggtgatgtttccgaaaacgggttccactccgtaaaattaagacgcggtgttgtcaggcctgccgtaaataataatgcggccgcttccccgaacacccttcctgacgctaaaattgctcctgtgataatagaaggaatcgcacttggaattaaaaccgtttttacggtatgccagcgtgatacacctaaagcgagagaggcttccttcagatctttagggactgaacgtatcgcgtcttctgtcacacgcaccatgacaggaaggttaaaaacagttaacgcaagcgctccgcctatgatcgtatatccccagcctgttaagttgacaaacatcaataatccaaacattccaatgacaatagacggaagagatgaaagcacctctatacatgttctgatgaagtcagttactttgttattaggcgcgtattcagccatgaagaccccgccgcccacaccgagcgggattgtaatcagcattgtaataaacaaaatataaaaggagttaaacagctgatctcgtatgcctcctccagctgcaatggcgctcgactttgttgtaataaattgaaaactgagctgagaaacaccgtttataataatataggaaaacaaacctactaaaatggcagcgataatggctgcacacaaaccaaacattccggtcgccagtttatctgttattttgcggttcattacactttcctcctagatgacaagtagcgaataagcaggatgaacaagaatgacatcaccagaagcacaagccccattgaccacagcgtattgttttcaacacttccgtatgtggtgtggcccatattcagcgtgatgatcgttgtcagcgttcccgcagtgtcaaacaggctttccggcaatactcttgtatttccaatgaccatctgaacagccaaagcttcaccgaacgcccgagccatgcctaacacaacagctgtcatcaatgttggaaaagctgcaggcacaagtacttttctgatcgtctgccatcttgtggccccaagcgcgtaagaaccctctcgtaaactcttcggaagagaagccattgcatcagcagaaatcgatgtgatcgtcggcagaatcatgacggaaaggacaatcgttcccgccaataaactgtgccctgttccgctcgatttgaactgggcgataaacggcaccaatactgtaagacctatgaatccataaacaacagatggaataccgactaaaagctcaatcaccggctgcagcactttctttccccaattcggggcaatctctgtcatgaaaatcgcacctgcaatgccaagcggcgcagcgattagagcagaaagaatcgttactgcaaatgagccaaaaataaatggcagcactccgtatttcggatcagtatctgtaggattccaatttaagctcgttaagaattcaattgggcttacaccatttacaagaaaagattgcagccccttcacgccgaggaaaatggtgatcgcaacagatgccgcaatcataatcagggcacatgctgtcacaatcattcttccccgaacttcatccaattgccgattttgccttgagctgattaaacgctcgctcacagacatattttctctattgtttatcattgttttacactcctatgaatgtgttaagaggagaaacggttgtccccgcactcctctttttattaagatcagctttgcttccctttggcatcgcgtgtcactttcatatcagtaaccggaatgtagccttggtcagtaacaatgcttttttgaatgtcttcactctttagataatcaagaaattctttagctaaacctgtcgcttcaccttttgtataagaatgctgataagcccagatcggatactcgccagttgctacatttttcgcttcaggtttaacaccgtcaatagatagagcagttactttgtcatctgttaaatatgagaatgcaagatatccaatcgctcccggagtatcagcaatgatctttttcaccgtgttggaggaatcttcagtaatgccttctgcaggctccgctccgtcaagcgcatatttcacaaatgtagcacgtgtgccggaagaatcagggcggtttacaagtgtaatcttttggtctttgccgccgagctctttccagtttttgattttgccagtgaagatttttttcaattcatcttttgaaatatccttcacaccagcatcagggtttacagctgctgccataccaactacagcgacttgatgatcgacaagcgcttttgcatcgataccttctttttcttcagcaaaaacgtctgaattcccgatctgaacagctccttcagagacttgagaaagccctgttccagaaccgccagcttgtacctgtatatcagcatcagggttttcttccataaatttttccgcggctgcaagtactagtggctgcattgccgatgaaccagaaatggttaaagaacctgatgccttttcttctccttttgcagaatcgctattcgattttttactttctcctgcatttccgcatgcagctgcaatcatcataaaagcagccatcagaagcataagcaccaatttgttttttttcatttcctgaattccccctgcgtataatgtgtaatttgtcctacacgtatagagtaaaggttctatgtaaaaagggtttgaaccgaatgttaaggttttgtaaatcagtgcgtttttttgtataaaaaaaacgcccacatcatgtgagcgtttctttttagttatcagaagacgttgtgttttctgcattttcttcgattttgtttttattcttttgctgagtatcttctttgtcctgcttcgatttcagctcaaaatatttatccattacttccctgccgatttcgtttgtaatggtatatttagcgctgtaatcaatataagcccaagggactactacagagatcgcaatctcaggattatcagccggtgcataggcaacaagtgtcgtattataagtcgatgttcctgtttttgatttatcaggtccatcatagaacgattgtgctgttcctgttttaccggcaggctgatatgacgctgaagcaaattgactggcagctgtcccttttgtcatcacccgtctgaatccggcctgaacctctttaatatattcactcttcatgtcgattttattcagcacttccggctgaacggattgtacgacagcaccgatccctcttttagcatcaggttctctgacttcctttacaagctgaggctttaagcgatatccgccgtttgcaatcgttgatacgtattgcgcgagttccagcggtgtatacgtgtcgtattggccgatcgcatagtcaagcaagaatcccgtcaatctgtctgttcctttatagcctgtcatttcattcggaagatcaattccagttttgacacccagtccaaattggctgaagtaattacggaacgtatcaaaggccgtcgtatcaatcggtaaagcctggtgcggtttatattcaccttttccgagcgcgatcgcagttttaaacataaatacgttggaagactgctctaaggctctttgaatattgaccggtcctaagttagtccatgactttttaccgcgtttatcctgactgccgatatacaatggttcatcctgaaaaactgtattcagattgatagctccggtttgaaggcctgtcaagactgttgcgcctttgactgctgaacccatagcgtaagatgacgtcattgtacctaaagcgtaatcatcaattttatatttcccattttcttgtttaatctgcttgcccgccattgaaagcacttcaccgtttcttgggtccatcatgacaacgaatgcccggtctaacaattgcgtgcttggtcttgctttagcagatttgaggttcttctcaatgattttttccacttctttttgcaaatcaatgtcaatcgtaagcacgagatccttaccggctttgccttcagataccgtttttgttcccgtgacattgccgtttgaatctgtgatattttcgactttggctttttgtccctgcagaaggctttcatattggtattccaaatagctttttccgaccctgtcattacggctgtagccaagcgacagataatggtcgagcaagttggacggcaatccttcattagagctggaaacacttccgagcactgagcgaagaaggtttttatacggatattcacgttcccaatcggacgtgacatcaacacctggcagttcgtctaaatgttcacttaccactgccatttccttcgctgatacatcttcgtttttgatatattgaggggtcaatgcatagcccgaatccatctgtcttttgatagcgaggatctgcatatctttatccgtcaattcattcaactgcttatcagtaatccgttttagctgaagctggtataaatcgtcatcggatatttttttgtcttcaacctgctgtctttctttagagctaatgagctttttcgcttctttcggtctagtcaaaatccaataatcttttttatcccgttctgttactttttttgtatcgactttgatcatgtcagacagcttttttgcgatctttaagcgctgttcttgcgtggtcgatttagatctcgtgtatgtgattgcatttaaagccttatttgtcacaatggcattaaagtttcgatcataaattttcccgcgcggtaccgctgagctgacttcactttgttcttgcttattcgcttggtttttgtaatcatcaccttgcacgatctgcttgatgcccagttccacaataatccaggtaaatataacaaaggcagctaaaaataaaatattcagccggatcggaagcgacttctttttctctttatgattttgcttttttggtttatttctcctcataacatcaccttttctatttacagaaagaaaagacactcaagtaagagtgccagttttcattttaaaggttttttcgacttttttctacagataacccctttttggcaaaaaaattatctctcgccttttaacagggtcggttctgttacccgtttttggccgtcttcttccatggtttcattttccccttctttctccttaaaacggatatccttgacaaagtaataaatcaaaggatgtcctatacccaatatcgcaagtgacaaaggaattcccacatcctctttcagaagggccacaatcaggagaaagcacaaaatggaaacaattctgccggcgttcaagaacatttctctaagcacgatatattcaattcttgcttttctggcatgcctcgcgcgccctatcacatcatatgtaagtgatacatatggcacaagcaacagaggatagccgatggcaataaaaacgccatacgttaataatgtcgaaaagctcatatggaacagaatcaaaaacagcgcgccatacaaaataagtccgcccagcaaaatcgatttttttctcgcctttttcttaatcagcctggatgcaaagtagtaggcaaagaaggaaacagctgaattgacaagaccgaatgtaccgagagcaagttcgctgtttgtctcaataaatacaaacacactgattaaaaagacaaaaatcccttctctcaaaccctgaaaaaaatgcgcattcgtgattctccgccaattcatattgctatggcgctctccaaatactttgctcagcataaaacggccctttgattctctccgttttaagaaaaagctcatcacgacagccagggcaaataaactgagggagagactgaaaatcactgtataacccgtattattttcaagccttgagatcacgaatccggctacaatcgggccgatcattcctgcagaggaagacagaatgcccataaacccgttgaaaaagtctcgtgtatccggctctgttatttcaaaggtcagtacgttaaacgctagccaataaaagccatagccaactccgagcaccgcgccgattagcacgaggcggctggccgccgtttctccggctaaaagcacacttaaataaaaggcagctaaaaaaatgacgccgaaccttaaaatgaataccctgtctatttttttggctaaccgtccagccaaataaaaggttatcggctgcattgtcacaatggataaattatatatcgccaaatcaataaatttccctgactgcttccaaagatacacattaacaaatgtattggacagtgcaattcccagcgagtaaagcccgccaatggtcagcagaaagagtaaccctttgtttacgtctacatcgcctatcactttttttagtttgctcattactgactcccctttactatcccttagtctgtctcactcaaaccgagatatgtaaaaagaagacataaaaaaacaaggtcccataatgaggaccttgtttgtgccattattttgcttcgctgtatagacgagccacttcgtcccagtttacaacattccagaaagctgaaatgtaatcaggacggcggttttgatagttaaggtagtaagcatgctcccaaacgtcaagacctaagataggcgttttgccttctgaaagcggagaatcttggtttggcgtgcttgtgatttcaagtttaccgttgttcacaacaagccatgcccagccagaaccgaagcgtccagctgctgctgctgcgaattgctctttgaatttgtcaaagcttccaaatacactgttaatctcttcagcaagcgcgccagtcggttcgcctccgccgtttggagataaaagtgtccagaataatttgtggttcgcgtgtccgccgccgttgttgcggactgcagtgcggatgttttcaggaacagaatcaagatctgcaacaagctcttcaactgatttgttggcaagagcagtgtttccttcaaccgctttgtttaaatttgtcacgtatgtgttgtggtgtttcgtatggtgaatagtcatagtttccttgtcgatatgcggttctaaagcatcgtacgcataaggtaattctggaagttcgtaagccatgataattcctccttagtatatatgtactgaaatgccgcttcacagcgagcctttcttcattcaatgtaacaaaagaatgctttgtaatcaatgaaaaagctcacgatttggctcatttcagcggacatatttcactttaaccgataatctgccccattaaacctgccgccagcatttcttataggaccgtccataaaaagtatccgatcatcaaaagctgtatgatgccctttgcaataacccctgttaaaaaaccaatgagtgagccgaggccaattttaaacgctgactttaagtccttctgatgaacgataagttctgcgcaaacagccccgataaacggccccaatatgatccctgcaaccggaatgacaaaaggcccgattaataaaccgatcgtgcttccccatatggcagctttgcttcctccgaacctttttactccaagcagattcgacacgtaatctgctgcgaataatactgcggcaaaaactgcctcaacaagccagaacatataagaatacggactgaatgaaaataaaaatccgtacaatacaaatccggcaacaataaatactacgctcggaataacaggatacaccagcccgataaaggcaatgataaaaaccgctgcaatcaacagccaatacaacatatccatagcttccatcctcccattttactctgtcttcttcatgtcttccttgtattcacacgcatgcaacgatacaataagcaacatatattagtttagctaggaagtgaagatagtgaatgtgtttcagcttttcattaaaagtacatactctccccgtgatattgcaaaaacaagatttcaaggaatcggaaaagcgattctttatgtatttttgctctctgtcctgtttgcaatccctaccgcttattatgtaagtacagggaccgtaaaatcaatgaacggctttaaaactgttttaaacaaagatttccctgatttcacaatttcaaacggcaaacttcaaacggatgagaaaaaagccacggaatctcaagcaaatggtttcgttatcgtgttcgatccgacagactcctatggcactgaacaaattgaagcaaagcaaaacgcgatcggcatccttcagaacaaatttgttttggccattgacggacaagcccaagaaatgtcttactcaatgatgccatcagagttacagaaaaaagatgtcattgcagggttaaaccaaaataaagcgatgattgtaactgttctctcagctcttatttttctcgtaacagcagcgggaaaatttattgaagtatcgtttttagcgcttatcgggttaatcattaagaattcgcagaaaaaacatttatcctatcatcagctctggaagctttctgcttattccatcaccctttcaactgtattctttacaatcatgcgggcattagaagcaaccgtaccaagtgaatttttgctgaactggtttgtcaattttgtcatcctgtttctcgttttaaaagagattccgtccaaaaaagctgctgtataaaccgaggctgcattcgcagtctcttttcttttgtcatgaatcgaaatggacaagcatactatggtataaaatttcgtatgcgggaggaaaagcgatgaagcgtctcaccttagtatgcagcattgtttttatactttttattcttttttatgaccttaaaattggaaccatacccattcaggacctccctgtctatgaagcatcagcaaaaacggctgtacaagaaccggcttataaaacggtgaaggtaaagccgggtgatacggttatgtcgatagtcggatcagcaggttctccggatgacattgtaaaggattttgaagcactgaatccaaaagtgaaagctaacgccattcaagcgggaacagcgtataaattcccggtctatccttaatttaacgttaatttcttgtcagttcggcgaagacactgttacaatgtaatttgtaaaataaattcacataaaccatactagaattgttatatctagaagcggcaactacaattaaggagcgattgcaagtgagtgaaatcacacatcgtacaaaaacgcgtcccgtcaaagtgggacctttaacaataggcggcaacaatgaagttgtcatccaaagcatgacaacaacgaaaacacatgatgtagaagcaacggttgcggaaattaaccgtttggctgaagccggatgccaaatcgttcgggtagcatgtccggatgaacgggcagcaaacgccattgcggatattaaaaagcgcatttccattcctctcgttgttgacatacatttcgattataaacttgcgttgaaagccattgaaggcggcgcagataaaatccgaatcaaccccggcaacatcggccggcgcgaaaaagttgaagcggttgttaaagctgccaaagacaaaggcattccgatcagaatcggagtaaacgccggttcattggaaaaacgcattttagaaaaatacggttatccgactgccgatggaatggtagaaagcgcacttcatcacattaaaattcttgaggatcttgattttcacgatattattgtcagcatgaaggcctctgacgtgaaccttgcaatcgaggcttatgaaaaagcggcgaaagcgtttgactacccgcttcacctcgggatcaccgagtcaggaacgctgtttgccggcacagtaaagagcgcagcaggactcggcgccattttaagcaaaggcattgggaacaccatgcgcatttcactaagcgcagatcctgtagaagaggtaaaagtagcaagggagcttctgaaatctttcggcttagcctccaatgctgccacgctcatctcatgtccgacttgcggccgtattgagattgatctaatcagcattgccaatgaagtggaagagtatatttctaagataaaagcgccgattaaagttgctgttctcggctgcgctgtaaacggacctggtgaagcgagagaagctgatatcggaatcgccggcgcacgcggtgaaggactgctgttccggaaagggaaaattgtccgtaaggttccagaggaaacgatggtagaagaactcaaaaaagaaattgacattcttgctgaggaacactacgcaaaacttgaagctgaaaaagcaaaattaaaagaagaaacacaaaaagcttgacgggaacccgtcaagcttttttgtgttagaaaaatggaataataaatattccaagcactaatgaaacgacaccgatacccattgcccaggctccaaggccttgagcacctcttcttcttgcgatatagccgacaataataccggcagctcccaataaaacaggcagtacaaacaatgaaataatggacaaggctaaagcgatatatcctattccccgtccttcattgacattgccgccgctgcgatcattgtcttggtcattgctgcggtcagcagcacgataaggctctgcgatttcagcagctgtttcctcaaaaaaaccgtcattgtcgcgggtaatatttgtcccttcagatccatgatcaacatagtaactgttgttatcacgcttttcgtaatcgtttgccaccttcaattcccccttctgttttattaaaggagcttttatagtttgatccattttgcctgattcatgtttgctaaacttttctgttaatgtcaattgtttatgttacacttgaagggatgaaactgaaggagtgtgggcatgttacgcttaggaatagatattgacggcacaatcacggctcaggatacattcgtcccttatttgaaccgttcgtttaatctttccatttcattaaacgatatgacggattatgatttaacaaagctgttaaacattacccaggaagaattttgggattggatgaatcaaaatgaagcgatcatatataaggaagcattgcttgcacagcatgcgaaacagtcacttgattttctcaaagaggagcacaagcttatttatattacagcgagacggactcatttaactgatattacctatgaatggtttgacagacaaaacattcattatgaccacatcgaactcgttggcggtcatcacaaagttgaagcggtcaagaatcataacatcgacctgttttttgaggatcatcacgggaacgccatgatgattgcgaaagaagccgggataccggtgattttgttcaattccccttataatcagcttccgattgattcaaacatcatcagagtaaacaactggctagaagccgttcaatggatgaacaacaataagcatcacttaatacgtgtcaataactgaaaaaggagcccaaaccgggcccctttttcatatatacgcattttacgcagtagtgttttcttggttttccgctgtacaatcagggcatgtgccataaatctcaaatttatgcccgctgacctgatagccatccaaatcatcacaaagcttgtccatcggacatgattcaatttcctttgttttgccgcaggcaagacaaataaaatgatggtggtgatgggtgaatgaacacttaaatcggaagagcttttcaccggacagctcagttgtttccaaaatcccaagttcttcatataaagaaagatttctgtagattgtatcaaagcttaagcctggataatcatcattcagtgcagacagtacgtttttagcggtaagatatctgtctgaatcagcaaaaagctgcagcatatcctcccgtttgtttgtatatttatatccgttttcttttaataggttcagcgcttcttggacgttcatgaagggtcccccttttcgctttgcttaagaacgtatcacatgtatgaaaaagaaaatggcagctgtctgtccagcaagccattttctttactgcagataaaattatacccataaaatgaataaaagtaaatgaaagcctagtggattgcgtttttgaattttccgcctctcgtttcatgagtattcataattgttatgaatgcattttgatcaacttcaaacacgatcgatttgagctttgtcacttccagccttgtgacaaccgcgtaaattacgtctttttcttcgtccgtatatccgcctttccccttcagcttcgttgtgccccgaccgagacggtgcaaaatcgcgtcggaaatctcatcatactgctcagacacaataatgacagcttttgtttcatcaagcccttggatcacggcatcaatcgttttcatcgcaatataataagtcatgaatgagtacatcgcttgctcaggaccgaacacaaaaactgcccaaatgaaaatgaacacattgatgaacataacgaactcacctactgaaaacgggagttttttggtcagcaaaataccgagaatttctgtaccatccattgaacctccgtttcgaataacaagcccgacgccaaagccgagtaaaagacctccgaacacagtagccaaaataggctgggttgtaatggcttctacatggtgaagtgaggattcaataacggcaagcccgacaatccctataaacgtagagactagaaaggtcttaccgatatatttatatccgaagatcataaaaggaatatttaatatgacaacgaaaaaagcgaaattgagaaaggggtttgacataaagaggtggtctaaaataagtgatacaccgataatcccgccatcaataaaatcattggggattaaaaataattcaatacttacagccgcagatgcagctcctaccagaatcataaagaccctgaaaataaaatgggtaaatgtttctttcttatgttgttttgttggggtcataaaatctcctttcctgcaataactattttaaatacattataaatctattttaccattaaacactgacacattttactgatttgcccatacattaagtctggaggtggaatgaccaatgattttatttcaaagaattattttacagcggcttaatcaggctactgctgatgatttgctgaagtactcaaaacaatacggaatcagcttaacaagatcgcaggccgttgaagtagcgaacttgttatacgggaaaaatgtaaacatctttaatgagagtgaacgaatgcggctgttgaaacaagtagagacgattacatcgaaagaaacagctcaaacagttaatgaactattcaaacaatttacaagctaaaaaatgggggtgttatcccccattttttattgctgtaaaatcttttcgagcaatgtatcatcaaattgtttttctttcagcatgtcaatctcaaaacggtatggcggttttttgttctttttatcttcaccgacatatggtgtttcaagaatttttggaatgtcttttaactgctcatggtgaacaacatattgcagtgcgtcaaaacctatttcaccaaagccaatattttcatggcggtcttttctcgcacctttgacatttttgctgtcattgatatgaagcactttaatacggtcaatgccaatgactttatcgaactcattcagcactccgtcaaagtcttcgacaatgttatacccggcatcatgtgtatggcacgtgtcaaagcacactgacagctgctcattgtgtgtaacgccttcgataatctgtgcaagctcctcaaagcttctgccgcattctgatccttttccagccattgtttctaatgcaatctggacattttgattcggatcaatcacttcatttaagccttcaataatttttttgatgccggcttcagctcctgcccctacgtgagcgccaggatgaaggacaatttgcttcgctccgatggccgctgtccgttcaatttctgaacgaagaaaatcaacacccagctcaaaagtggacggatttgtcgtgttgccaatattaataatataaggcgcgtgtacgataatctcgtcaatgccgttttcttgcatatgtgcccggcctgcttctatatttaagtcttcaattttctttcggcgtgtattttgcggtgcgcctgtataaatcataaacgtattcgccccataagagactgcttcctggcttgctgccagaagcatatgttttccgctcatagagacgtgtgagcctattctcagcaacaggttcccctactttcttttcttagattggtttcttctctgttttttcttgattttctccatctcatagctcattttctttttatacccaggcttaaccttcttcggctttttcacgagacgatgagcaatttcatccgcttcattcggcgtttttttacgctttttgcggcgctgacggtcatcgccttttttccattcgcccttttcaagctctaagtaatcaaattcgatgcccattttttcaagtcttactaatgcatcctcatcagtaagctcataaatggtcatcgcttgtcctgatgagccggcacgagccgttctgcccacacggtgaacatagaaatcgagatcatccggcagctcatagttgataacatggctgacacctttaatatcaatacctcttgcggcaaggtcagttgcaatgatatatgtgaattccaaatcattgatctgcttcatgacttttttccgctcacgtggtgttaatccgccgtgcagcaagccgattttcatgcctttgccagtcagatactgggcaatatggtcagccgtatttttcgtgttggcaaacacaatccccaggtatggattcagatgcgacatgatgtcaaaaaggagcttgtccttgtcacgatgtttcgaaggaatgaggatatgctcgattttcgcagcagtcacctgttttggctccacatgggcgtatttcggattttccatgtatttcttcaagaatggtttcagcttttccggtatggtcgctgagaacacaagcatttgcagatcctcaggcatgcgggaaccgatgtaatctacatctgcaagaaatcccatgtccagcattaaatccgcttcatcaataacaagagattccgctttatgaacacttaacgcctgttctttgattaagtcagcaatccgtccgggtgtaccgacaacaagatgcggctgtattttcaatttatcaattgatttttgtttatcagtgcctccgataaaacatttcgagcgaatctgactgccttcctcaccctgcgtgattttaagcgcttcctgataaatctggttggctagctctcttgtcggagccgtaatgactacctgaacgacatccttagcaggatcgattttgtttaataaaggcagtaaataagcgtgagtctttccagtacccgtctgagactggccgatgacgctttctttttttaacactgcaggaatcagccttttctggatatcagtcggttcgtaaaaaccaaggcgatgtactgcatctataataaatggtttcaattcataaagttcaaatttcgtttctttcatttttcccagctccttaaagcggcacattatgtgtccatcatcacattatacccgattttgcttaaaaacaccacgtttgcaaggcgtttgttttattcagttatgtaaagcaaataccgcagcccatgcatattctaatagcagagagagctgaaaggaggtacaagtatgttttcaccgcagcagccaatgagaaattacccacagcccggaccgccccgccccatgccaaatcagcgaatgatgggcagaagaccgcctaatatgcgaggactttcatttggagcacagcagcaaggttttcagcaagccggacaatttcttcctcaggcaaatgccggagcgagaaatggtgcaggtgcaggcggaggcttaaaaggaatgctgtcaaggttcctacccggcggaggaggcgctggcagtgccggagttccaggagttccaggagcaggtgccgcagcgagcggaggtgctggcctgcaaggcattcaaaatatcgccaatcctgcatcattatccagtatgcttggaaatgtgcaaaaagtactcggcatggcgcagcaagtcacccctatgatccagcagtacggcccattagtccgcaatctgccagcaatgatgaagctgtacagccaattaagtaaaagtgatgatactgagacagaggccaatgaggaaagtgaaaaacaatccgtttcagaagaatcatcagaaaaagaaaaagagactgaaacaaaaacctcagatgggaacaaaaaatcaaaaccaaaaagttcttctctcccaaaaaaatctaaaacaactgacaataaagaacaagaatcaaaaacatctgcctcgaagaaaaaggaagctgcctctcctgctccgaaaagaacatcaggcagttcaaaaccgagattatatatttaacattctttgatatctgaagtgagattggctataatgagatcagaagaatgcaagaatagagccgtttgattacggctttttatattgcctttactcacttcagtattggaggacaaccgaaaatggacgtaattaaaatttcaccgcgcggctattgctatggtgttgttgatgctatggtcattgccaaaaatgcgtcactagataaaagcttgccaagacccatctatatactcgggatgattgttcataataaacacgtcactgatgcgtttgaagaggaagggatttttacattggacggctctaaccgtctggacatcttaaagcaggttgacaaaggaactgtcattttcactgcgcacggtgtttctcccgaagtcagaagaatcgcagaagaaaaagggttagtcgcaattgatgctacatgtccggatgtgacgaaaactcataatctaatcttagagatgaaagaaaaaggatatcacgtaatctatatcggcaaaaaagggcatccagagcctgagggagccgttggcgtagcgccggagatcgttcacttagttgaaacagaagaagatgtaaagaaccttgatatccaagcagagaagttaatcgtgacgaatcaaacaacaatgtctcaatgggatgtccacgacattatggagcttgtcaaagaaaaatatcctcatgtcgaatatcaccaagagatttgcctcgctactcaagtgcggcaggaagctgtatcagagcaggcaaaaaaagcggacttaacaatcgttgtcggagacccgaaaagcaacaattcaaataggcttgctcaagtgtcagaggaaatagccgggacaaaagcataccggatcggcgacttaagcgaattgaagctcgaatggctgaaaggcgttaataccgttgcagttacagcgggagcttccacaccgacgccgatcacaaaagaagtcattcgctttttagaacagtttgatcacgaagatccatcaacttggacaactgaacataatataccgctcaaaaaaatacttccaaaagtaaaagcaaaaaactgaggctgtaaaagcctcagtttttttatagaaatgtaaatggatttgtatctgtttcagaaacaaagatattcacgtcaaactttttatcattacacattgatgtcagctttctcgtgacgccttctttcatgattttttccgcatagtgtcccggatcaaccacatttaggccaagcatcatggcatcatgggccacatggaagtataaatcccctgtgacgtaaacatcggctccctttcgttttgcatgatgaatatacttgtttccatctcccccaagaacagctacctttttcaccatgctgtcagcatcccccaccattctgacaccattgacgtcaagcttgtctttcacaaataaagcgaattccttgagcgtcatctcatttttaagggttccgacacggccgagtcctttttcggcaggagtctgttcaacaggatagatatcgtaagcaacttcttcatatggatggctttttatcattgcattgataacagctttttcgacgcttttaggaaatacagtctcaagccttacttcatgaacaagctcaagctctcccacttcaccgataaaaggcttagctccgtctaatggtttaaaactgccgattccttcagatgaaaacgcgcaatggctgtattcaccgatatggccagcccccgcatttccgagcgcggctctgacctgctcttcatattccttcggcacgtatactgccagctttttcagaggatccgtataagtaggcaccagcacttccgtctcactcagctctaatgcttcagcaagcaaatcattcacaccgccgtccgcaacgtctaaatttgtatgagctgcataaacagcaatatcatgcttcaaacacttttcaattaaccttccggcaggctgatctgttgaaatatgctttagcggccggaaaattggtggatggtgtgcaataatcaagtcaacctctttttcaatcgcttcatcgataacgctctctaacacatcaagtgtaaccatcacatttttaattggtttgtttaaggtgccgatttgcaggccgattttatctccttcaaccgcataggctttcggggaaaattgttcaaacagctggatgatctgctgcccatttacacttttagccatgatcgattacctcctttaacagctccattcgatcggcgagctcctttaatttttgtttgttttgctctgtatccgccgcttggctgatctgttcataaatgctttgagtgtgctgaagctcttgtgtccactttttcaaaaagacagcatttttttcttttgccaagaaagggccaacgagcatcccggctgataaagaaataccgtcataagccgcatccctgtctcccgcttctgccaccagcacctcatagcactttccgtcctcttcaaggattacctcatctatcagcgcatatctttctttataaagccactccctgatatgaacagcatgaatattcggctgtaaaatgagccgttccttccccgttaatttgtctttgcccgcttctaaaatatgagcgatcaaagatccgcccattccggcaatcgtaatggcatcagcttcaccttttttaatcacttccagtccgtctccctgccttacagaaatgtgcgagtttaagcctgatttttcaacctgccgctttgcagacaaaaatgggccgtctgttatttctccggcaatcgccccgctggctttatgattcagcaccgcaaaacaaggaaggtaggcgtggtcagagccgatatcggccatcaccgctccattcggtatgtactccgctactgtttgcaatcgtttagataattttaattcgttcacttgtcatcacaacttttctcaatcattttttcctttactatcatataaaaaatcagcccggaatccaagctgaagcaaatgattttgaaattatttcttttgatgggggtctgcacgcggcagtcaaaaataaaaggctgtcgagaacatctcggcggcctgtgaatgtataaagagaaaaatggttcttttatttaatttttgacacccactctgccatatcatccagcttatcggccggtacaagaccggaaggcattccattaccgcctttttcgatctttgttttaatttcagcgacatctttcttatcccctacaccttttaagctaggacccgaaacaccttcataattttcaccgtggcatgcgatgcagtttgccttgtaaatttcttctggtgaagcgtttgcatctttcttttcagcagatttgctttctcctccgcttgcaatctcccgagagtcatcaagtccttttactgataaaaagaaagttagaccaattcctaaaacagcgatcagcaaaaatggaataagcgggttccatttcatttcccttccccctttttgatccttccccctatgtaaacacttctaattctaacttatttttacaaaaagtaaatggattgctatacaaaagttttttattcacactttatacaaaattgaattgaaacatgcctaaatctctaatatcctttttattctattgtataatgtattgtatacgcttacaatagaaaatatggaattagattttgaaatttttcaccacaatgttcatttgcaaatgacatcatttttcagtaaaataaaggcatattatccatatatctttttaaaaaaaagaagaacggatcttcaagacccgttccatcttattcaaggaaatctttcaaacgtttacttctgctaggatgtcttagtttccgcaacgctttggcttcgatttgtcgaatacgctctctcgttactccaaatactttgccgacctcttctaatgttcttgtacggccgtcatcaagaccgaatcgaagacgcaatacattttcttcacgatcagttaacgtatcaagcacatcttccagctgctctttcaatagctcgtatgcggcgtggtcagaaggtgaagttgcttcttggtcttcaatgaaatcaccaaggtgcgagtcatcctcttcaccgatcggtgtttccagagataccggctcttgagcaatctttaagatttcgcgtactttttcaggcgttaaatccatatcttccgcaatttcttcaggtgttggttctctgcctaagtcttgcagtaattgacgctgcacacggattaatttattaatggtttcaaccatatgaacgggaatccggatcgttctcgcctgatcggcaatggcgcgtgtaatcgcctgtctgatccaccacgtagcatacgtactgaatttataacctttgcgataatcaaatttttcaacggctttcatcaggcccatgtttccttcctggatcagatcaaggaacagcataccgcgtccgacataccgttttgcgatactgacaacaagccgcaggttcgcttcagccaatctgcgtttagattcttcgtcaccttcttcaatcttttgagcgtaggcgatttcttcttttgcagaaagaaggttaacccgaccgatttcctttaaatacatacgaactgggtcattgattttaacgccaggcggtacacttaggtcattaaggtcaaattcttcttcggctttggcaagctgctgaatattaggatcttctgtttcttcattctcactaattaattcaacaccttgttcacctaaaaattcataatactcatccatttggtctgattcaatttcaaagctggacatacgctcagcaatttcttcatatgtcaaaacgccacgttttttaccagactctgttaattgctcttttacttggtcgaatgttaattctgtctcgtgggtttgtttatcagccattatggatccctccttccaaagcttgcaacgaattctataagcggtatgattcttattcggtccattcaggcgttttctatgtgaactgcctttaacaatgtgcgaataatgaaatgacaattcatgatgaggttaagcgatctatttgctcctccgcaaggaatcattgccaataaatgctcctcatcagttctccagttattttaaagatcggttcaatgtaacgatttcttgagccagagaagcagctcttaaaaaatctttttgcctttcggcttcggctctttccgcctctttttcttttatcattgaccaatttctttgattcaacactttttttacataatctgataactcggcttcgctaagctcttgattaacctgaagcattaatatatcggacaagagctggcttatatgatcatccgtcaccctggccatcagatgctgaggcgtcagctcggctccctcttcataaaaagcataaagataagcggctaatgcccggtgctcatcaatattaaattgaaaccctacccggtcaatcacttttttgatgacgctccgatctcgaagcatgtgagcgagtaacagcctttctgcattttcatacgccggacgcaaacgtttttgccttgcttttgtcgtcagatgcgctcgccgcgtttttgtttcaccgctattgtcagcaggtttgttttgcttgctgaaaacagacagctgctcagttaaagactcctgtgaaagcgaaaactctgaagcaagctgctttacatagacttcctgctctagagaccctgaaagcgtgctgatttctttcagtacgtctttaatgtaagctaggcggtcgccttcatcggacaggttctttccttttcggaaatattgcattttgaacgccattacggtgacacttgcgtcaataatgtcgtttttaaatttttccccgccgaattttttgatgtaatcatcagggtccaatccgtcaggaatcattgcaactctgactttgcagccttttttttgcagaagctccgaagcttttaaggtggcttcataaccggctttatcagagtcatagcaaagaatgatttcttcgacgtttcttctcaggatcttgacatgatcatctgtaagagacgttcccatcgtggctatgctttcctttacacccgagcttacggccgatatgacatcagcaaacccttcaaataagactgctctttcctgctttctgatatgaaggcgggccttataaaaattgtaaagcagtttgcttttatgaaagagcggggtttcaggactgttcatatacttaggctgctggctgccaagagccctgcctgagaaagcaacaacagccccgtgatgatcatggatcggaaacatgacacggtttctgaagcggtcgaaatatccgcttccgtcttcgcgtctgatcaggagacccgctttttccatttgcgcctcactaaatcccctctttacaaggaatttcgtgataaagtcccaagaatcaagagcatagccaatctgaaattcattaatcagctctttcgtaaagcccctagaaagcagataatccagtgcctcttgaccttcttttgtatttattaacaaatgatggtaaaatttcttcaggagctcatgtgcctcagccattttttgttctccagaagactctggccgggctccggaatggactgttatatcatctggaaaatcaatttggtatttgtcagcaaggtgagaaaccgactcggcaaaagaatagccttccatctgccttaaaaaagagaaaacattgccgcccgctccgcagccaaagcaatgaaaaatctgtttgtcgggcgatacggaaaacgaaggtgtgctttctccatgaaaaggacagagtccaaagtagtttcggccttgcttctttaattgaacataatcacctatgacttcaacgatatctgccgacttttgcacctgatccacaatttcatctggtatccgatttcccatcttataacactccgtcgtacattattcgatgctttagtgcaaaatcccttcatcgttcgacaggattttttgcagcagtgtaataaatcgttctcgatcttctttattcaattttttaggccctttggcatatacgccttttcttctttgtttgccggaaaaatgacggccctctagggcaaaatcaatcgtgtcttccttgtaaagacgacctctttccgacataacagagacatttctgttcaacagcagagatgctaatccgatgtcctgcgtcacaacaatatctcccggtttcacgtgatttgcgatatataaatcagcagcttctttatgaggatcaacatacttccatttttcttcattgcttctggaaagctgataatgttcaaatgaagcgacaaaaagaacttgaacttcatactcggatgctgtttgtaaaatttcatcttttaccggacaagcatcagcatcgacaaaaatcgtcttttcttgttcattaagaagagtaattctccatccctccattaaactcctgcataaaagcaagcaaaatcgcacatcctttattattgtggatgtatatgaatttgtcgaaaaatttccgggagaaattcttgacatcttacccataatagtttattcgtatcacacgatccttaaacctaaaattaatcattttatcacaattttttattataatacaaacttcacaaagatgctattgtttttcattattcccttttggcacagccaaaaacccaggatagagcgtcctgagttatatgttttttgttttgagatgatggataatatttgctgtttcctcaaccgctttatttgaaacatcaacaacctggcagccgatccgatccacaatcttttcgaaatactcgagttcctctttgattctgttgatatttgcataaatcgctttatcattaagcccgagtgattttaaacgttcttttctgatatgattcagtttatcagggctaatctttaaaccgatgcattttttcggatcaacgttaaagagttcttccggcggatcaacctccggtacaatcggaacattggcaaccttcaggcgtttgtgtgcgagatattgagacagcggtgttttagacgttcttgacacgccgatcaaaacgatatcagcttttaaaatccctcttggatcacgtccatcatcgtatttaactgcaaactcgatggcctccacttttttgaaataatcttcatcaagctggcgcacccgccccggttcgtatttcgctgttaaaccgtaggctgtttccattttatcaatcaacgggccgataatatcataatataaaacatttgctttttccgcttcggctatcaaatattctctgatttccggcaccacgagtgtaaaacagataatgccgcagtctgcctttgcaagtgaaatcacttcattgatagtgcctatatcttcaacataaggaattcttcttacatgagtatcatccgccgatccgttaaattggctgagtgctgcttttactaccaattcagccgtttcaccgacggaatccgatacaacatagatgatgcggttattcatattatccccccgttagtttgcaatcttataggatttcattttcagataaactgacaagtattttggtcatatttgtttttgtcactctgccgatcacttcaaagcctttatcggtgtctttgatgacaggcagtgcatcaatttgtttttctattaagtgctttgcaatgtccatcacataatcctcgcgtctgcacaccgtaatgttcggcatccttgtcatgatgatgtgaacagggaccgatgtaagctcctgctggccaatgctcgctctgagcaagtcttttcgtgaaagcaccccgactaaaacagcatcgcggtccaccacaaacagagtacctacatcttctaaaaacatggtgcaaatcgcatcgtacacagaaacgttttcgtgaatcactacggggatagattgaaagtctttcacctgaagctttttgagtttatccgccaaaagctgtgtgccggtttttcccgtatagaaataaccgactctcgggcgcgcctcgaggaatcctgacatggtgagtatggctaaatccgggcgcaatgtcgccctggttaggttcagcttttctgcaatatgctcccctgtaatcggcccgttttcttttacaatctgcaaaatatgttcttgccgtttatttagttcgatcgtactcaccaccttttcacttcatagctatgtaaagaaataataatccatattataacgtaaatatcttgtaatcaaacaaaaaacttataaatggggaaaagacgattaccgatcacacagcaaccgccttttctctctttattttacaataagggcattcatattcgcaaaggacttgatctcatccgccaagcttaccatttgcgctaaacgatttgcctttaatgactcattatccgctataaccattgtatgatcgaagtaagcatcgatcggttcttttaaggctgcaagtgaagcaagcgccgcctcataatcttttttgctgaagttttcctgcagattttgcttcgctgtttggtaggcatcaaacagttttgcttcgtattcattttcaaacagatcaggctgaatgtctccgcggactccttttttgctgatagagatcactcggcctaacgcttcggctgtttccttaaagccaggtgcaccaagcttttgctccagtacttgtgctttatgcagcgcagagtacggctcaagctcagagctttccagcacggcgtcaatgacatcatgtctgatttgttcagcattcaagacatatttcaagcgctgagtgaagaaatccagcagttcattttctttatcggtttgaacgaaagtaagcagctcttcaaatgaaattccccagttgcggtcaagaagaatcgcaacaataccgcttgcttggcggcgcagtccgtaagggtcctgggaaccggtcggaattacgccgatagagaagaatgaagcgattgtgtcaagcttatccgccattgctacaacagctccggtgaaagtagaaggcgtttctccgcccgctgatctaggcatataatgttcattaactgccgcagccacagcttcatcttcgccaagcattctcgcatacttttcgcccataattccttgaagttcagggaattcatatatcatatgcgtcacaaggtcgaatttagaaatttcagcagcccgcttcacatgttttaatgtatcttcatcagcctgaagacgaacggcaagtttctctgcgattgatgtgactctcctaaccttatcagcaagagaaccaagctcttcatggaaaacgatattttcaagtttcttcacatttgcatcaatgtttagtttctgatcttccttgtagaagaatgaagcatcagataaacgtgcgcgcagcactttttcattgcctcgggccacattttcaatcgcgtggctgttgccgtttcggactgtgataaagtgaggcagcaggtcaccgtttttgtctttgacagggaagtagcgctgatgctctttcattgttgtgacaagcacttcttcaggaattgacagaaactcggattcaaatgaaccgtaaagagctgtcgggtattctactaaatgattcacttcatcaagaaggtcttcgtcaactggaatgctccaattgttttcagcagccattgtttccagctgagattgaatcatttgctttcggacgctaggatcagcaataacatgctgttctttcagctgctcttcataagctgaaggtgattcaattgacgcttcatgtccgaggaaacggtgtccctgtgttgtccgtccagactcaacgtttgtgatcgaaaatggaatgacatcctgtccaaataatgcgacaatccatttgatcggtcggatataacgcaaatcttcatttccccagcgcatgtttttcgggaaatgcaagcttgtaattaaaccgctcaattctggcagaagcgacttcgtttcttggccggcttggaatttttgcacgaatacatactctatgccttttacttctttgatgtacaggtcttccacatttgcgccttggccttttgaaaagccgattgccgcttttgtccagttcccgtccgcatcaagggcaatttttttcgcaggcccttttgcttcttcttttatatcatcctgcttttctgcgacatccttaacgaacacagcaagacgtctcggtgtattgaagagtttcacttcaccgtgagtaatatttttttctttaagccagcctgtcagcttgtcgccaagctgaaccatgctttcattcaaaaagcgcgccggcatttcctctaatccgatctctaaaagtaaatcctgtttactcatgagaagaaccctcccctttaagcattgggaaccctagtttttctcgttcctcatagtaggtttttgctacttttctagctaaattccgcactcttgcgatatagcccgtccgctcggtaacagagatcgcacctttggcatcaagcaggttgaaagtgtgcgagcatttcagcacatagtcatatgctggatgaacaagtccgttgtccatttgcttgatcgcttctttttcatatgtgctgaacaattggaacagcatatcgacgtctgatgtttcaaacgtataaacagaatgctcatattcagccatcatgaataaatcttttactgtaaaccctgacgtccattccaagtcaaacacgttttctttatcctggatataagacgcgagacgctcaattccatacgtaatctctacagaaacaggtttacactctaatcccccgacctgctggaaatacgtaaattgtgttatttccattccgtcaagccaaacttcccagcctagacccgcgcagcctaaagacggattctcccagttgtcttcaacaaagcgaatatcgtgctcaagcggatcaattccaagagcacgcaaggaatccaaatacagctcttgaatgttatcaggtgacggtttaataatgacctggaactgatgatgctgatacagtctgttcgggttctccccgtagcggccgtctgccggacgtctggaaggctctacataagccactttccacggctcaggaccgatactgcgcaaaaatgtatacgggctcatcgtgccggctcctttttctacatcgtaagcctgcataagcacacagccctgactggaccaatgcttttgcaaggttagaatcatgtcttgaatattcatttcaagcacctccacttttctttcataagttgactgcgacagcaaccaaaaaactcccgtctctatgcttgccagccgcaaacatagggacgagagttctcccgcggttccaccctagttgctgagaacaaaatcccagcctcttttttaaaattgctcaagaatgcctttcgttgcgtgctcatccttagcttccaccgccctaaggtcgctttcatgaggtaaacgcaagtacttctttctctcactgcaacatattttataataaatgatcatataaaaagatggaccaaaagtcaacttttgttttcacccataagatgtttcatgctttccatttgatctaaaaagcgctttgattttaaatacaatcccgaatattcttcgtaatataaatcaatcacttgctttaattcagcttttgtttcctcttttaaggacacattgccgagcctcgacagatcaaaatagtaaaagagtcttaacagccttgccgtttgcggtttgatcggtatcctgtaaggatctttttcaaaacagcggtggcatataaaaccattatcacgaacagagaaatgaaaggttccgtcttggcttttacaatgtacacaatgatttagctcaggatacaggcccatgacaccgagcatcttcatttgaacaatgaaggtgataacatccggatctgttccttcattcagctgttttaatgactctaatatgaattcaaataaataaggatttggctttttttcttctgtgcctctgtcgactaactcagcaatataggcagcatatgctgttaaaaacaagtcttccctgatgcctctcatgctgaggatcatttccccctgctgaagcgttccgaggcccgatgttttttgcattaagaaagaaccatacaaaaagggctggctgactgctgataaacggctgttcggttttttggcgcctcgtgccataacacctatttttccgtgttctcttgtcagtaaagttacgattttattcgtctctccgtaatcatttgtgcgaagaacgattccttcacattttgtcagcatttccgcaccttcctcaagcaggagcggccaagaggtttataaaattggataatcaaatcgggctagctcatcttctagttcttcgggtctttccatgttctctttttccagttctttaaaaagaagatacgtatcaacatttcctgtttgagaaaatacgttccaggtaaaattcaacacaagaaacccacctttctgtagttaaactagcttacctaaactccaaattcttacctttatcttgaccagatgtcctccatttcatgttaaacaaaatttgctaatgtatccctgttcctgtgagataatgacacacacagctagagattaatattcgtcctctttaaagccaaaatcgcgaagctgggacattttattacgccagtctttctgcactttcacccacaattcaaggtagacacgggagcccaacagtgcttcaatatccgctctcgctctttttccaacctcttttagaaggcttccttttttaccgatcacgatgcctttctgggaatcccgctcgaccacaatcgttgccgctacgtgcacagaaccgttgtcctgccctttgatggattcgatggccaccgcaatgctgtgcgggatttcttctctcgtcaaatgcagcaccttttccctgattaattcagaaatgataaatcgctcagggtggtcagttacctggtcactcggatagaattgcggcccttccggcaaatacgcttcaatctgagcgagcaaggtttcgatgttatttccttctaaagcagaaatcggaacaatttccttaaaaggataacgtttgcggtattcgtcaattagcagaagcaattggtcgggatgaattttatcgattttgtttacgattaagaatacaggcgtagacatcgtctgcaatttctcaatgatgaattcgtcgcccttcccgtagccttcctcagcattgatcataaacaagatcaaatcgacttcttttaatgtattttgcgccactttcatcataaagtccccaagtttatgcttaggtttatgaatccctggtgtgtcaataaaaatggtttgtgatgtgcctgtcgtcagtactccttgcaccttgtttctcgtcgtttggggcttatcgctcatgatcgcgattttttgtccaatgactctgttcaaaaatgtagattttcctacgtttggtcttccaataatggatacaaatcctgatttaaagctttcgttcgtcatgtaaatcctccgatgaaaatgcgcctggcaataattcttccacagtcatttcttttatttgtccttgtaaattagtcagtacgacaataacgtcttttgtgcaaagctcagaaatcacctgtcggcaggctccgcacggagatactggtccaggggtgtcagccgcaacggccagcatctgaaactctgtatccccttcagaaacagctttaaataaagcggtacgctcggcgcaattgcacatgctgtatgccgcgttctcaatattgcagcctctgtacacttttccatccttggtaagaagagcggctcctacttggaatttggaatacggcgcatatgccatatcacgcgcttttaaagcttctgttattaattcttgtctgttcatgtgtacattcctctcttacctataatggtaccgctatcactttatattttacataatcgcgcgctttttttcacgcccatttctaaaaatgtaaaataaatgtaagaattttcagccattacagctttggcaaaaaaataagtaaaccaatgatacacgaaatcacggcaaaaacgcaaacagccccggcggcagcgtccttggccgctttagcaagagggtgatgtttgtcagttattaaatcaaccgtatgttcaatggctgtatttaaaagttcaagcgaaaacataccgcctatcaaaaggaatataatcatccactcaatcatgctgagctctacaaggaagccgcaaatgagaacagcgcaggcggctgcggcatgaaattggaaattccgctccgtccgcgctgtttcccatatgccccggcctgcatgcacgaagcttttgaagaatcgattcagctcatttctatgatcttttgagtccataagcgtccagcaattccttttgcttagtaaacatctcctcttcttcctctttcgtcatatggtcatatcctaaaaggtgcagaaatccgtgtacagctagaaatccgagctctcttttaaaagaatgattatactcctctgcctgctctcttgtgcgatcggcactgatgataatatcacctaaaaccggaggcatttcggcgcccacgatttcgatctcgccttccccctcttcttcaagagcaaatgagatgacatctgtcggagcatcctttccccggtattctttgttaatctgatgtatgtcatcattggaaacaatcgtgacagaaacttcagcctgatcctgaacgccttcacgctcagcggcaaattgaagcagattttctacttctttgagcatctcttctgagacgcttcccgtttcatcaacgatatcaatcagtaaactcatctatttcaccttcttagtagcctccggatattcaatccgggagtggaaaattccttttaatgttgcacagagcgtttttgcgattgtatccagctctttaaatgtcaaatcgcattcactgaactgtccgtcctgaagcttatcggatataataccccggacaagcttttcaattcgttcaggatttggattatgcatggatctgacggccgcttcaacactgtcggccactgatataattgcggcttcctttgactgcggcttcggccccggataacggaactcttcctctgtaatctggtcgcctttttccttcgctttatagtaaaaaaactttaaaagcgaggttccatgatgctgctcagcaatatcgacaagctctttcggaaatttatagcttctcagcatattcgcaccgtctgtcgtatgcgagataataatatttttactcaactgaggtgacagcttgtcatgcggattgtcaatattcatttggttttcaataaaatattgcgggcgctttgtttttccgagatcgtgataatatgcgccgactcttgcaagcaaaccattagccccaaccgcttcacaggctgcctctgataaattggcaaccattacactgtgatgatatgtacctggtgtttctgtcagtattttgcgcaatagcggatggttaggattagacagctcgagcagcctcatggtggataaaatgccaaagcccgtctcaaaaaacggcatcaggccgatgatcaatacagatgaagcaaaccccgacacaacccccatgagcattaacgtgccgatttcaagacccgacagcgcagtgttctggatcaataataaggatagaacgacaaccatattaataaacgccacgaaaagtccggtctgcaaaatctttgatcttgcattgtgttttcctaaaaataatacacctgaaatgccgctgatcaaataataaatccctatgacataattgaatgttcctgtcacaccctgattaaacatcatacttccgcaaatcgcaagaatgatacttcccaaaatggcaatgcgttcattcatcagcagtttgattaagatggcgcctgccgcaatggggaccagatagccgatattattatactccatcttctgaaacaaactgacaacctccatgatcacaagcaaaagtgttgtgataatcgagaataacagaatggattggtttttaaacttcagattttgtttctgtttttcaaaataatatacaagtgttgcaatgaaaagtccgatcataatcaatagcccgctgatcggtttaaagagatttgagttatttaataacccagtcagctcaagtttcctgtacacttcccgatcaatgaggtcattttcttccacgagcacttgcccctgtttgatttggacctgctggacattatctgaggcttcctgccgttttgcctctgttgctttcggatcgaaaacgtaattcggaataatagcaaaacgcccgatttctgtcgcagctcccaagtatttagacggaatagaattgctctttagctctttttctaccttatcctttgcatcagatagtttatccgaggggatttcactgctcatgaccgtatttactgcggtaatgaccgtatctctgacaaaagaaaagtcttcactgtctgctttcagcaatgtcttgatggaatcctccgatatagaatcattcacatctgatgtcaatttgtcctttacagatttgaccattgatttttccgatggtgatttactgccttcctccgatgattttttcacttcactaatactgtcgaatattgatgacacaaggtcaatccgattgtctgtatattctttttttaatgtatattgatcttcaaccgcgtcctcagcggcttgctttttttcctctgtggctttttgatcttctacggttgccggagcgtaaatggtcttgtcgctgactgaaaacaggtctaaatcaagtgtttccggcttaacatgtacaaagagcaaagcaaacataatggcagccagcagaagatacagcagtacatgcatggagcgggcatttttaaaactgctccattttttcgagctgcttttggtcttagccttctttttcaacacaagaacctcctcttgaaacatcaagcccataagcaatcataaaaatgacccgataacgcgcgatcgggtcattcagcattaattttgcttatcgtatgcttcaataattttcgcaacaagcggatgtctgaccacgtctgtctggtctagctcaatcatagaaatgccgtctattcctttcagcatctccttcgctactgcaagtcccgatttgacgcctttcggcagatcaatttggctgacgtcacctgtaatgatcattttagagccaaaacccagtctcgtcaaaaacattttcatttgagcaggcgtggtattttgtgcttcatcaagtataacataagcatcatcgagcgtccgccccctcatatatgcgagcggagcaatttcaatgatgcctctttccatcagacgttctgtatgatctgccccaagcacatcatggagagcgtcatacagcgggcgcaaataaggatctactttttcttttaggtcacctgggagaaaaccaaggctttcaccggcttccacggcaggtcttgttaaaatgatttttttgatatgtccgttttttaaagcatggactgcttttacgacagccaggtacgttttcccggttcccgccggaccaatgccgaatacaaggtcattccgcttcatagcggccacgtattcccgctgtcccattgtttttacacggattgatttgccttttgcgttttttgtaatttcttcttcatacatgctttcaaagtattcaagttcattcttctttgccattttgatggcgtaaatcacatcacgttcagagatctctatccccttgcgaattaaagcgaggagcgatcccagcagcctgtctgcaatctgaaacgattcatcatcgcctgacacataaatcgtctcgccgcgcgtaatgatatttacattcagatctttctccatcaatttcaaaaaagaatcttggttcccgaagagtgaaagcgcctcgtccgggtttttcagtttttgattcatcgcaagtaaatgttctgtcattcttcagtctccctgacaataggtgtggtttgaacgatatcttctataacttggtagagaataatcaactttactttaccattctcaacagtctggtgcaaaactttttcacttttcacctcgccgttttcgcctattttatcctctacatcctgtttacccaatttaatgccttcttgaactgcttcttctttcgtatattttcgcaaagcctcttcactttctctcgtttgctctttgacataggatacagggagcttaaatccgagaaaatgaagcgaatgcttttcttgttctgtttttggatgcttcaattcctcttttttaaacgtcatcccccagatcgggattgccaaagaaccaaaagaaagcttgtgctttgtccttactttgcccgtatagacgttaaataatgtttcaagcgggactgtcacttctgatctataccaggtttctccgtaaatttctgcttttgaggcgacttcctgctgatggtcttcgctgccgatcagtcccgaaacaagcagctgtcccttttcaacatgatcgtgtatggcggccatgggctgtcctttttgcacaaacattctcgtaatggttgctttctttttggcgacaatattgcgcgggctaacatatttttctttttcgggctcatttttctccacaactttcatatgaatggtcgtccccttcagatcaactccgacccaagtgatattgtctattccattggttaatgatttctgtattttttcgggcgacatcattaaaaactgcagacggccctttttgacgccgatttcattaagatgctgcctcatttgatgttctgtttcaggcttagcgcctgtcacatcaattttccacaccatattggacagcaaaaacaaaagaatgaaaaaaatcgcaaaaccgatcgtaaaccctatattcagctttgatttcagcaacaggaagggaaatcccttccgattgataaatcgggctttacatttaaatttacttcttacccgccgaaaggcatgtacatcctgaagctgtatatataacgatacggcttctttcttttttttgacatgaaagaccggaatcccctgtcttgtgcattcattaaggagccgctcaatccctcttcccgtcaattcaagctggaccttacccgaaaaaaaagacagccatttatttttcacaacatttccccctcggctttatgactcaacatatcgaacgacatcaatcgtaccctccaaaagtatctcttccggaagaatcgccttgatgacaaaatttttaccagatatgatgcactggccctgcttcagcatcagccgcacttcattctcactgaaaagcaaaaggcctctgtggttttctatgtagatatgaagtctgccaaccattgtaatcctcggcagatccatcataacgtccgggggaatttccaatgctcttgtcagccaagctttcatacgattctttctttgccccatacaaaaagaaccccctttcatctcatatgtatgatttgaaaggaggttctaacactttaatttttacgggccgggcgcatcgtacggtgaggttttttcgcccgtggaggtccgaacacctctcctagaacgatcccctgtacgacggtgtctttattcacctgaagcattttttgttttgtgtatactgttttttgtttggcagcagcaagatctcgttccagccctttcaggtttcttgctgtttccctgcgtctttcttccgcttcccgtcttgcctgttccatacggttagggataggtgcaggggcatcttcttttgactgcttcttttgaggagaagcagattgcatgtgttgaggttttttacttttttggctgttttgcttttcttctttgctctttttgccgaaaatcgcagaaatgattccgatgatcgctgcaataataagcggattggtcagtaaatcttccatcagcgttctcccttcttagagagattatgatttgcggtcttcatccgaagggtctttcgtcagcttgccgaatgaatcacgcatttctgtgtcagcatcgatgttcttgatattcatgtaatccatgacgccaatattcccttcacgcaaagcttctgccatcgcaagcggcacttccgcctcggcttctaccactttcgcgcgcatttcttctacgcgggcacgcatttcctgttcttgagcgacagccatcgcacgtcgttcttccgcttttgcctgcgcgatgtttttatcagcctcggcctgatcggtttgtaaaattgccccgatgtttttgccgatatctacatctgcaatatcaattgagagaatttcaaacgcagttcctgagtccaatccttttccaaggactgtctgagaaatcatgtcagggttttcaagcacttttttatgattatcagatgaaccgattgtagaaacgatcccctcacctacacgagctacaatggtttcttcccctgctcccccaacgaggcgctcgatattcgctcttactgtgattctcgctttcgctttcacttcaatcccgtccattgcaacaccggcaatgaacggtgtttcaatcaccttaggattaacgctcatttgaacagcttccaacacgtcccggcctgcaagatcaatggcagcacagcgctcgaatgtgagttcaatgttagctcgctgagcggcgataagcgcgttgacgactctgtcaacattacctccagccaggtagtggctttcaagctggtttgttccaacattaagtcccgctttatgggctttaatcagcgggttaacaacccgattcggaatgacacggcgaagcctcatcccaactagagtgaaaatgctgattttcactccggctgccaaagctgaaatccaaagcattacaggcacaaatgtaaaaaatactgccaaaacaatgatcgctactgcgacaattgccagaatcataagtgttgacggatccatataacttctcctcgtttctatttaaatttctctcacgacaatgcgtgagccttctactttaatcacttttacttttttatctttttctgtaaacgatccctccgaaacaacgtcaaggcgttcatcatcaataatcacggtaccggaaggacgcagcggtgtaaaggttatacccacttttcccattaagtccgtgcgcgtttgatttgaaacgtagccgctctccgtgtttgtagaatcatttaatatcaatttcttaaagaatttcatacgctttcccaacacccttgtcagtaaaataaaagctgtaatcgaaacagctgaggcgatcaagagagaaaccgccatgacagtgaagctccccgcggctaaaaacaggctcgcaataatcgctcccaaacccagtaatccaatgattcctccgggaagaaaaatctcaagcagaatgagaatcacccctgctataaagaggagaaccgtctcatacccggcaaggccggctgcaagatgcccgtaaaagaacagcaataacgcaatgagtccagccgttccagggaggccgacacccggggaaaaaagctctaccgtcagacctaaaaaagcgattgtcagcagaatagggacaatgaccggattcgtcagccatcttgctgtcttttctgcaaagctctcctttgcatagctgatctgcgccttttcgaacccaagcttctttacgagcgtggacaaattgtcagcagtgccttctgaatagcctacctcaatcgccttgtctgcgttaagtgtcagcagatctcccttaggcgcgccaacttccttggcatctatatctgggtcagccattgcgagcgcatattttggatcgcggttatttttcactgcggcatcttccatctctgccagccaaagtgattgagctttttggtcagcggcattgccttggccatcaacaatcgcggaggctcccatttttccgccaggcgccatataaatgtgatctgcttgaagtgcaatatatgcaccagcagacaacgcgcgtttgttgacatatgcagttacggggatctcactttcggttatcaaatcggccatatcaatagcagatttgaccaatccccccggggtattgatatcaagaataatatggtctgcatgtgcatcctttgcgtcttgtaacgaacgggacaaaaacgaggcgagaccctgttcgacatttttttcaaccgggatcacataaacagtttgtttttctgcttttgcgttcagctgtacgcctaataaagaaagtaaaaatatacccaaaagagcagcacggaatcctttgatttgaagcaagggcggtgtatccctccttccttttataataagtgccttctcttcatacgtaacaaatgtatcaaaggtttcatttttttatgtataaaaaaagacatctctcttagaaagatgtccttttctttgccatttaagacagttgactgctcacaagcttattaattaaacttccgtcagctttaccttttactttaggcataattgcccccatcactttgcctatgtccgcttttgagctcgcaccgacctccgcgatggtttcatttacgattgtacgcagctcttcttctgacagctgctcaggtaaataaacttctaaaatgtccagctctttttgaactttatctactaaatctaaacgattagcgtttgaaaattcctggagggagtctttacgttgcttaagttcacgagaaaggacagtgagttcctcatcctcggtcaaactgtctttcttaagcttaattgcttcattttgaagtgaagccttaaccattcgaacgacagtcagtttgtctttctcacggtttttcatatacagcttcatatcctggttgagacgctcaagaagactcataaatccaccctcttttagaatttgcgttttctagcagcttcagactttttcttgcgctttacgctaggtttttcataaaattcacgctttcttgcttcttgcaaagtacctgtctttgatacactgcgtttgaagcgacgaagagcatcttcaagcgattcgttttttctaacgaccgtttttgacattctctttccctccctccgaatacaccaatcgactacctttaagttacacatataaacatgtactttgacattataatataagccatcagtcaggtcaactaagtgagttcacttttccgtcatgagtgcgactgcctgtctatataatgaaagaaaggggttggtgaataggatgttaattctgattagctttactgctcttatattattctttctcgcaggcatgaacatgcttcgaaaaggcttaatttctatggcgtactcaaaaattgaagaacgtttgcttttatttacggaccatccgttaaaagcgtttcttatcagcattgtatttacgggaatacttcagagcagttcagcttttatggtcattgtcatcggctttgtaagtgcgggcgttctttcttttaagcggacgataccaatgattctggggacgaatgttggctctacttttacaactgaatttattgctatcaaaatggatattttgatctgggttcttttaataggaggtttattgttttttctgactggcaggtatcctttgaaacagctgggaacaagcttccttggactgggcatcatcttcttttgcatcagcggattcagccatcttgccgggccgctgacaaagctgaaaacgggagccgacgttctataccatgttaacgattcaaactggtccgctttgctcatcgggatggtgttaactgccatcattcactccagttctgtctgtatcggcattttgatgagttttatgaatgaagggattatcggactgacacaggcgatgagcgtcgtactcggatcaaatatcgggacatgcattacagctgtcatggctgctgtatccgggggatatgcggcgaaacagacagcgtatgcgcatgtggtatttaacgtgctaggggtggctctagtattgccttttctgaccgcagcgaccggctttgtagagcagttatcacccgatcctgcccaaaggattgctcatttcagccttttatttaatgtggtgacagctcttttgtttcttccgcttacaaacttgttttaccgcttgattcactttcttatcccggctaaataaaaaaccggtacattttaatgcaccgattttttaggttaagaagacaaacgcatatgttcagttatttcatcctcaaccacacggacaaactgtccttcgttgtaaggataacctgcttttaggattttgacttttacgattttgccgatcatatcttccgtgcctttgaaaacaaccttcatataattgtctgtgtaaccgacaaacatgttctcttcttctgtttctttataggcttcctcaggaataatctcaagcacttcattttcatactgagaagcgtattcttttgcaagctggtcagaaagagcaatcaggcggtgcacacgttcgtttttcacgttttcatccacttggtcttccattcgcgcagctggtgttcctgtacgtttactgtaagggaaaacatgtagctcagagaatttatgttctttaataaagttataggtttccataaattcttcttctgtttctccagggaacccgacgatgacatcagaagtaacagctaagcctggcagtgcttttttcaatttatttaaacggtctgcaaagaattccattgtatacttgcgtctcatccgtttaagcactgtgtttgatccggattggataggaatatgcaaatgattcactatcttatctgagcggtctaagacctcgatcacttcgtcagtgatttggctggcttcgattgaagaaattctgatccgtttcacgccttccacacgggtgtctaattcgctcaaaagcttagcgaagttgtaatctttcatatcttcgccgtagccgcctgtatgaatacccgtaagaacaatttccttatatccggcatcaacaagctgctgcgcttgtttaatgacctcttcaggatcgcgggagcggagcaggcctctcgcccacggaatgatacagaatgtgcagaaattattgcagccctcctgtattttcaatgacgctcttgtgcggtccgtgaaagcaggcacatcaagctcttcatatactcttgctttcatgatgttgctgacgccattaatcggctggcgttcttctcggtattggtcaatgtagccaagcattttttcacggtcctgtgttccgactacaatgtcgacaccggggatcgccataatctcagcaggtgaggtttgcgcgtagcagcctgtgacacagatgacaccgtcaggattttgacgaatggcgcgtctgatcacttggcggctttttttatctcccgtatttgtaaccgtacatgtattaatgacatatacatcagctgtttgttcaaagtctcttctttcatagcccgcttctttgaaaagctgccagattgcttctgtttcataatggttgactttacagccaagcgtatggaaagcaacagttgccattactgatcacctcttaataactctgtttgataagaaatcgcgctcaacgcgtatagcggagcggtttctgtccttaaaattctcggtccaaggccgcacggcacaccgtcttgctctgtgagccgttcaacctccgcttctgttaaaccgccttcgggaccaaatacgatcaatagagatgatcccttcggaaggctgcttacaatcgcgctgaatgcgcttatttccccttgcttcgatgactcctcgtatgcaacgacacatttatcgaaatcctgcatcctttgaagaagctgctgaaaagaatggacatccatcactcgcggcacttcgttacggtacgattgctcagccgcttcctttgcaattttcgtccatctttcccgctttttctttgcctttttgtcatccagcttgacaacagaacgcgcggcttggaaaggaataaaggcatgagctccgagctcagtccccttttggataatccattcaagcttatctcctttcggaaggccgctcgcaatatagacctttatcggaagctctctgttttcattcgtccattctatcacaaggcaggacactttatctttggaaacagattgaagttcacattttgcctcgaagccgtcttgagagcagcagataatctgatctccctcattcattctcatcacgttcacaatatgatgaacatcttcgccggtaatcgaaaaagccggcgcttcctctatttgctgcttcgtgagctcgataaaatatcgttgcatacgctgtgacacctactaactgttattttttcgcaataatgctgacccaatcttccattgaaaggatttctacaatggtaaagccagcttgttccagtgcttcttttacttcttgttttttatgaccgatgattcctgacgtaataaagtggccgccttcttttaagaggctgtacgcttgtgaagtaaagcgaagaatgacttcagccaaaatgttggccacaatcacatcatgttccccttcaatcccgtctaacaaattgttttgcttcacttgagcaatatcgctgactttgttcagcttgagattaaggcgtgcactttctacagccacgggatcaagatcgtaggcatgaaccgattcagcctcaagcattgcagccgcaatacttaaaattcccgaaccagtgccgacatcaatcaccttatcacccttttgcacaaagcgttcaagcgcctgaatgcagagtacggttgtcggatgtgtccctgtgccgaaagccattcccgggtccatttcaataatcagttcatcagtatggaccggcgtatattcctcccacgtcggcacaattgtaaacttttcagaaattttcacaggatgataatactttttccaggcagtcgcccactcttcttcatttacttcagaaatagtgatgtggtttctgcccaaatcaatattgtaaagaaggagattattaatcgtttctttgatgccgtctacagtttcgcccagaaaactgttaaccggcagatatgctttgacaatgacaccctcatctgggtaatcattggggtcgagctggtagatttccccgtacacattctcacgttctttaattaaatcaagcgggtcctctatcacaaccccacttgcaccagcttcatgcaatatatttgagataggttcgaccgcttcatgtgttgtgtgaatgcttaattcggaccatttcaaaactaccaactcctcatccaataattaatcgcctttaaacgcccgttttaccttgtcaaagaaactcatttcctgttcgtcaggcaggtttccgctgacttcggcaaattcgcggataatgtctttttgtttatctgtcagatttgtcggcgtaacgacgcggacgacgatatgctggtcaccctgtccatagcctctgacattttgaacgcctttgcctcttaatctaaatttcgttcctgtttgtgtaccggccggaattttcaatttcacttttccatgcagcgtcggcacttctacctcatctccaagagcagcctgagcaaacgttaacggcatttcacagtaaatatcatcgccgtcacgctcgaagaactcgtgtgcgcgtacatggaacacgacaaataaatccccagcagggccgccgtttattcctggttcaccctgtcccgagagacgaagctgctgcccgtcatctacaccggctggaattgtcacattgattttcttgcgttttttgatttttcctttgccgccgcagtccgcacatttgtttttaatgattttgcctgtaccttcacagtggtggcagacccgtctgttaacgacttttccaaacggtgtattttgctccacgtttaactggccggagcctccgcagtgggagcatgtttctggatttgttccaggtttcgcacctgagcctttacatgtttcgcacgtttcctcgcggggaatttcgatggttgtttctttaccgaaagccgcatcctcaaacgacagggtcatcgtatactgtaaatcagcaccctggcgcggagcgtttggatctctccgtcttgtgcctccgccgaaaatacttgagaaaatatcatcgaaaccaaaaccgccgaaatcgccgccgccaaaacctccgccgccgaagccttggttagggtcagtgtgaccaaattgatcgtaatgcgcacgtttttggtcatctgacagcgtttcgtacgcttcttttacctctttaaatttttcatctgatccggcttctttgttaatatcaggatgatatttttttgacagcttccgataagcttttttaatttcatcctttgaagcgctcttacttactcccagcacttcatagtaatcacgcttactcatctcgcttcactctcccgaatttctcacataaattagattgtatcattttgaattatgatttttcaattccttttatcccgggcaagaaaaaaagtcaaagccaagagatgcctgactttgactttctaatcattgaatcagattatgaaatgtgttcttttcggtcagctccggaagcggggctgacactaaaaagaacttattttttgttttggtcgtcgtttacttcttcgtattcagcgtcgacaacgttgtcatccgctttgccttcagcgtttgctccgccttgagcttgctgtgctttagcagcttcttcataaagcttcatagaaagctcttgaacgattgtttgaagctcatcctttttcgctttgatctcttcaaattcgtttttctcaatcgctgcttttaaagcatctttggcatcgttggcttttttcacttgttcttcgtccactttgccttcaagatcttttaatgttttctcagtttggaaaacaagctgatctgcttcgttgcggacttcgatttcttcttttttcttcgcatcagcgtcagcattttcttccgcttcttttaccatgcgttcgatctcttcatcagagagacctgaagaagatttgattgtaatgttttgttcttttcctgtgcctaagtcttttgctcttacgtttacgataccgtttttgtcaatatcgaaagaaacttcgatttgaggcacgccgcgcggtgctggcgggatatcagtaagctggaagcggccgagtgttttgttgtcggcagacattgggcgctcaccttgaagaacatggatatcaacagctgtttggttatcagcagcagttgagaacacttgagatttgcttgtcgggatcgtcgtgttgcggtcgatcagttttgtaaacacaccgcccattgtttcgataccgagagaaagcggtgtaacgtcaagaagaacaacatcttttacgtcacctgtgataacgccgccctgaatcgcagcaccaagcgctacaacttcatccgggtttacgcctttatgcgcttcttttccagtttcttttttgattgcttcttgtacggcagggatacgagttgatccgccgacaaggatgactttgtcgatttcgcttgcagaaagtcctgcatcttgaagcgcttgacggacaggacccattgtgcgctctactaaatgagaagaaagctcttcgaatttagcgcgagttaatgtaagttcaaggtgaagcggtcctgcttctccagctgtgataaacggtaaagaaatttgcgtagaagatacgccggaaagatcttttttcgctttttcagctgcgtctttcaaacgctgaagcgccattttgtcttttgacaaatcaatgccgttttcttttttgaattcagacacaagatgatcgatgataacttggtcaaaatcgtccccacccagacggttgtcgccggcagttgaacgaacttcgaatacaccgtcgccaagctcaaggatggaaacgtcgaatgtaccgccgccaaggtcgtatactaggatcgtttgatcttcatctgttttatcaagtccgtatgcaagcgctgctgcagtcggctcgttgatgatacgttctacttcaagacctgcaattttaccagcgtcttttgttgcttgacgctcagcatcgttaaagtatgcaggaactgtgataactgcttttgatactgtttcgccaagatagctttcagcgtatgatttaaggtgttgaaggatgatagcagacacttcttgtggagtgtaatcctttccttcaatttcaactttataatcagtacccatatgacgtttgatagacataattgtgttagggtttgtaatagattggcgtttagccacttcccctacttgacgttcgccgtttttaaatgcaacaactgatggcgttgtgcggtttccttcagcgttagcaataactttaggctcgccgccttcaagcactgccacacatgagtttgttgttcctaagtcgattccgataactttactcacttgaataacctcctgctatgtaattattgattcactttgaccatggaagggcgaatgacgcgatccttcagcttatagcctttttgcatttcctcaacaacaatgttggagccgtagttttcgtcttcagcctgcataacagcttggtgcagattaggatcaaattcctgccctacagcttcgatggcttcgacgccttcttttttcaaggcttctacgagctgacggtggaccatttccattccctggagcaaacttttcgtctgttcattgtcggcttcaacctgaagcgctcgttcaaagctgtcaagagccggcagtaaatcagtcacgatattttgagaacggtatttttgggacgcttccatctctaaacggctgcgtcgtttatagttttcaaagtctgcttgaacacgcaaaagtttgttttctttttcctcaagcaaaccttgcaattcgttaatttggttttgaagaagttcgctttcatttgtttcttcctgctgttcatcagcggcagcttgttcttcaatgatttcttgctcttctgtttcgttttgttcaacggtttgtttttcttctgacattgtgttcacctccctcaaagtgtaaggagaaggacaggtgctgcccttcgataaaatttgccaaaattcccttattcatcatacagacttgttaatgcttttgacaagtccgaagtcacatgctgaagcaggctgacaaccctggaataattcatgcgggtcgggccgatgatcgcaattgagccgatctgcttctggtctacggaataagaagccgttatcagactgcaattttccatctcttcatagtcgttttcttttccgattttaatcgaaattcccgtgtgcggggattgaaccagctttaaaacatcctgttctttctcaattaatgaaaggagcgaccgaactctggtgatatcatggaactcaggctggttcagcatattgattttcccgccaaaaaacaacttttcaacgtgatttgtggaatgaaatgttgaacgaagcgcgtcgagtatattgtcatagtttttaatgtgctgtcttaggtacatgacaacttccttaaatatgcgctcattcagttcatccattggaacgccgcttaaacggtcgttcagtatatttaccagtttttcaatatcagacagatccattttggtcggaaagttaatcgttttgttttccacatgccccgtattggtaacgagaatcgctaccgccatatcaggctgaatcggaatgatttgaatctgtttaaggtaattctcactcaacttcggcccgagtacgatggatgtgtaattcgtcagatcggacaaaatttgcgctgatttttgaactgtcttctccagctcgaaaattttctctttgaagatcgagtggatttggtccaggtcgcttttcgtcaatttgacgggtgacagcaaatggtcaacatagtaccgataccctttttctgacggaacacgtcctgaggatgaatgggttttttcaataaagcccaattcctccaagtcagccatctcgtttcttattgttgcagagctaaatgtgatttcatcttttttcgaaagagttcttgatcccaccggctgtgccgatttaataaaatcgttgattataacctgaaggatcagcagctgacgatttgttaacatcatcatcacctctgttagcactctcaataagcgagtgctaattctataacaaaagtatcaaaccacaagaaaaatgtcaattataactcacccaaaaaagcgccaaaaacttcattgcctaataatttcccttgatgagtcaaataaacggcagactccgaattgtgaatcagccctttttcagcgaggtcttttaacacgcttgggaaaagtccatccagggaacggccgtatttttctgcgaatcgttttttgctgacaccggctgtttttctcaaacctaaaaacatttcttcctcaatctgttcttctgttgttacttcatgtgtatctctgtacggaaaacccttttcagctatcaggtcaatgtaatgcttaacaggtccgacgttcactgttcgtgtgccgccgatatatccgtgagcgccggctccgaaaccgaaatattgttcgttgctccaatacgttagattatgcttagattccatgcctgccttagcaaagttgctgatttcatattgatgaatgccgtgagcttccatctggctcatcaccatttcatacatttcagcttcctgctcctgcggcggaagatgaagccgccctttttgcatcaaattataaaataccgttttcggttctacaataagggagtaaacggaataatgctcggcatccagtgataaagcagtgtttatggaatgttccagatgcttgagggtttgccccggaagcccgaacatgagatcaagactgatattctcaaaaccgatttcccgcgctctttcaaaagaggtgaatacatctttttgcttgtgcactcggccgattttttctaacagatcgtcttcgaacgtttgcacaccaaagctgaggcgatttacgcctgcttcttttaatatttttaatttctctgcggacaagtcgtccggattcgcttcaaccgcaaattccgataagtcgcttgagggctttagcacgcggttgatcatatctatcagctttttaagctgttcctcagacagggaggtcggcgtgcctcctccgataaagattgttttaagatcaggctgcccggtttttgctattgtatttatcatttcctgttcgagtgcgtttaaatactcgtcgactggctgactttgaataaaatatttattgaaatcgcagtagtggcaaatatgctcacaaaatgggatatggatataagctgatttcaacggattcaccttctttacagaaagaagccgcagtacaagactgcggcggcttctattgttttttcggactgtcgtccattttcagaactgccataaatgcttcttgcggcacttcaactgagccgacctgcttcatacggcgttttccttctttttgtttttcaagaagtttccgtttacgcgagatgtcccctccgtaacatttagccaatacgtttttacgcattgcttttatggtggagcgggccacgattttctggccgattgcggcttgtaccggaacttcaaactgctggcgcggaatgagttctttcagtttttcaacgatcacttttccccgttcatatgcgtaatcacgatgcacgataaaggaaagggcatcgattttttcaccattcagcataatgtccattttcacaagcttggacggtttgtagccgatcagttcataatcaaaggacgcatagcctttagtgcttgatttcagctgatcaaaaaactcatatacgatttccgctaatggcatatcataaatgatgctgacacggtttgcgtctaaatactgcatatcaatgaaattgccgcgttttccttggcaaagctccattacagcgccgacatagtcattcggcaccatcatcgtcgcttttacgtatggctcctcaaccctttcgatcttttgaggatccggcatgttggacgggttgtcgacaacgaccttttcgccgtctgtcatatacacgtcatagataacgcttggcgctgtcgtaatcaggtcgatgttgaactcacgctcaattctctcctgaatgatctccatgtgaagcatgcctaaaaatccgcagcggaacccgaatccaagcgcttgcgaagtttccgcttcatattgaagggaggaatcattcagctcaagcttttcaagagcttcccttaaatcattatacttcgctgtatcaatcggatacaaaccacagtacaccatcgggtttagcttgcggtatcccggcagcgcttcttctgcaggattggcagcgctcgttattgtatcaccgacacgtgtgtcaccaacatttttgattgaggcagtcaggaagcctacatcaccgaccgtcagttcatttgtcggagttgctttcggcgtgaacacgcccacctctgttacttcgaattctttgccggttgccatcattttgattttttgtcccggctttaccgttccttcaacgactctgatataagccacgacaccgcggtaggcgtcataaagcgagtcgaagatcagcgctttgagcggcgcctccggatctccggtcggagctggcaccttttctacgatttgttctaaaatctcctcaataccgataccggcttttgctgaagcaagcacggcttctgatgcgtcaaggccgataacgtcttctacctcttggcgcacacgttcgggctcggcgctcggaaggtcgattttattgatgaccggaaggatttcaagatcgttgtcaagcgctaagtagacattggcgagcgtctgcgcttcaatcccctgggctgcatccacgacaagaatcgctccctcgcaggcagcaaggcttcgggatacttcatacgtgaagtcgacgtgtcccggcgtatcgattagatgaaagatatattcttctccgtcttttgctttatatttaagctgaacagagtttaatttaatggttatgccccgctcacgttcaagatccatagaatcgagcaattgttctttcatttctcgttgagtgattgccgacgttttttctaaaatacgatccgctaaggtcgattttccgtggtcaatatgggcaatgatagagaaattccgtattctcgattgcctctctaaacgcttttctttatctgtcacaatctatcactcctactattaaacgcaaaatacactagcttagattatatcaataggattgtaaagattcaatgtaaaacaagaaagagaaaagttccctatcatatctgggttgcttttctctttcacgtacttattgattcatatcccgtatccattcatacattgactgggcagtattggttacggtgtccgaaagcgcttttccggcttttgaaaacatattgaatgtctccaccttttccagctctttttgtttttcttctaaatcttttgccgtgactgtttctcctaggattgaggcttctttttcattatcttttccgtcggtgagcgtaaacgcccccttcagtgaagggtcatgatagcctttcatactcagcatcccgtggtttgcctgctgcatgccgaacagaacgcctaaaaacatgatcgtgacaagcagtaagcactttccaaagtatgcaatcaaatcaaccacctatttcttattgttttttcgtctccccgctcgctgcgttgaccttttcagcatcccagtacatttcgctgaatacgtccgcggccgcgttagccgcacgctgcagctcttcgagattattatccactccgccaaactcgagcaaaagcgctctatcggttaaatcctgattgtaaacaccattatcgcctggcgagcctttggaaaagacacctgtgctaagtccggggtattttttctccatcagtttatgaagctcactcgcaattttatagttttcttcgaagtttttgctttttttcccgacgacaaaggctaccctggcatagcttttccctttaatcgttgcggttgtgtcttttttgcgccgagagtctctgtggatgtcaatgatatattgcagatttttgtttgaagcgagggcgtctttcacgaccggccttgattcatcataggacctggcatagtttaagccttttttattcaattttgactgtatatcggttttattcactgtggctccgattccctgggattcaagcgcttgtccgaacatatctcctacaagcgtgacattggctttagaatggcgcgccatgtcaggatcggtctcgccttttaatagagggagatatgattccgtattgtgcgtgtgatagataaacacgacctttttatcacctgttgtttgtttcggcggatctttttgcgcattatctgattgcgtttgctgtttttcaatctctgccaaattcgcttctctttcttcctccatcaccttagacggcggcggcgattccgcaggcatattcgtataatccgttccttgtccagctaacaaaatctcggtatcaaattgtgcaaatcctggcagctcccgaccgagaaagctccgcggatcttcgaggttaatgctcgtcgccagctttaaagaaagacgagaaagatgaaatgagctgtctgtttgagagaggtcagaagcgaaataatggttttccatctgcagcaaatgtgcaaatacgtcacccggcaattcttcagcaatcccataaaaagagtcagacgacggcctaagttccggccggagagacgtcagcacaccggatagaacaaaaatcacgataaggcttacgataaatagaaagatggcttttaccgctttccctccatttaccgcaacaacaatctgtctgtttctgcgtttatttctcattgaatccctccagcgcttgtctagtaattactctatgaacaagctagaggaagtagaactgtttagtgattgtaggagcctttgttttcttgtgacactttttcatgaagcgctgtgtttaatccgttcgctaaaacatttgccatatcgtcgataaatgaatcgacttccttcggtgtaaccattaagttgtgccctaaaggcgaaagcacctcgtgaatgagctgccgtttttcatcttcttgaagggttccgacaatacctaggaacgattggcgctgcttttgatcgggaagatcgtcttcagtgagcactttctttttcccaaacgtcatgcctgccggaacaagcgatcttgatggcctgttatccttcatttctctgccaaaatgttttaatatgtagtccaccgtgtcgctggcaattgtcacggcatcaactactgtcggaacaccgatagcaatcaccggaacaccaagcgtgtctttgcttaaatcttttcgtttattccccactccagaccccgggtgaatgcctgtatccgatatttgaatggttgtgttgaccctttccaccgcccgcgccgccaacgcatcaatggcgatgacaaaatcaggcttcgattgctcaatcacacctttaataatgtcacttgtttcgattcctgttatccccattacacccggtgcaaaagcactgacaggcctgtaaccctcctgtacgttttccggctgaagcttaaacaagtgccttgttaccaacagattttctactgccatcggtccaagcgcatcaggtgtcacgttccagttgccgagcccaacgatcaaacagctcgcatcttttgagatattaaggttttcaagaaaagctgagaattcctccgcaaagacagcagagaccttctcttgcatttccgaatcattctccctgattccctgtgcttcaagcgttaaatagcgcccttctttttttcccgaaagctctgcgccttcctttgtaacatcaactgtgcggattttaatgccgccgtgatcacgctctttttcaataaagcctttaatttcttttgtcggcacagcctgctgattggccattgcttccttcgtttccactgccaaatcggtccgtatcaaatactgattcacatccagctcactctttttcatacaggggcctccttcacattaagtacctatattgttgccatttgctgaataaatcatgctaaaaagagaaccttcaatgaaaaatactttacatttatattgcaatctaaaggtgtgtttgatagaatacaatttgttctattgtgaagaagatttaaccttaagacactgtgctacaggttgtatcttaggaggtgaaacacatgccaaacattaaatcagcgattaaacgtacaaaaacaaacaacgaacgccgcgttcataacgcgacaatcaaatctgctatgcgtactgcaatcaaacaagttgaagcttctgttgccaacaacgaagttgacaaagcgaaaactgctcttactgaagcagctaaacgtattgataaagcagtgaaaacaggtcttgtacacaaaaataccgcagctcgatacaaatcaagactagcgaaaaaagtgaacggactttctgcataatataaaaacgatcctcaataatggggatcgtttttttcatttctttttaacagctgtaaaaggaacagttcgagcaggagctgcttgtcctttttcccggttttcatctcatagtccatgacggcaagctgttcaataattaaacggagctcctcctctgaaaaaagccttgcttgatccatcgccagctttacccgaaatgggtgaacttttagattagaagcgatttgtttttgtccgtatccctgttccgcgaagtacttcgtctgcagaatcagccggaactgattcgaaataagcgccataattttgatcggttcttcattttgttttagcaaatcataaaaaatttgcagactctctgttcgttttcggttgacgattttattgatcagctcaaaaatattttgttcaaggcttctagcaacaagcatttttacatcatccagcgtaatttcttcacgatctccaataaacgtgcagagcttttgaatctcctgaaaaatcgatgacagatgaccgttcacaagcagaaccaaatgctccgccgcttccgtgccgattgttttctgctctgtttttgcaaggttgacagtaaagtctgtcgtttcctttgcatttaattccttcgcctccatcataaacgcgtgcttctttaacgctttcgtcagcttttttcgctcatcaagcttttcatacggagcaagcaggacaaagactgtgtaaggcgcaggtgattgtatatatgattcaagcgcactgacgttgtgctcaattttttcttttttcttttcacctgttaaaaaatatggatttttcacaatgacaagacgccgctcccccataaacggaaacgtttcagcatctgcaatcgcttgatccagcgggtcctcttccagatcaaaaacggatagattgaaatcctttgtctcctgatcaacgaccgtctgtctgatcctgctgacggtttcttgcagcagatatgtctcttttccgtataaacaataaactggatggacatctccttttttcaggcttttccacacatcaaataccattgttgtacgacttcctctctttcatcatccccttctatcctaaattgagtttgcaaaatagtaaagaggaagcctgactgctgcttccccatttatattaaacgcctgttcgcaagcccccgggacagcttgtaaaaaggcgataatcaccagaacagaaaacgttaccttagcttctagatttttcaaaacaattccattatacttaagtcagtcaggagggataaagttgaatgattttgaaaaaaacgttcaaagcaaacgaaatgatgctgtagattcagctgttggttttgttgtgtccttcggatttttcgccttcttgtttgtcatggcaacggttattcacctagttggttcataacagcgactgcccgggctgctgatttctcggcagtcttttttagttcgtctctgttatatctgatgtatcatatggaggatagacagaaaaggttccaactctgtttttgtatctatattggatcgttccgttttgatctgttcgcagcacgcggatagaatgtctctgtaatagttgcagaacttcttgatgaggatgatggtaccgattgtttttcccggctgagataatggccgttttcggctgaagctgttggatgaattcttcaccggtagagcctttgctcccatggtgccccacctttaagacatctgctttaatatttggaaacacgtccatcacctcctgttccccttctttctccaggtcacccgtcaagatccagctcataccgcccgtctccatccacagaacgagagaggaattatttttgcttgccggatcaggtgctccaggtgacagtacatggaactgcaaatcctttatttgcaatacatctcctcgcttcacctcttcaattgtcactccctcttctctggctgtctgcagcactttctcatctttaggttcagaaacgaaccctttcggaatcacgaggcgctttactttatgatgcttcagcagagtctccgcctctccgatatgatcttggtcagcgtgcgtcagaattaaagcgtcaagctgtttgattcccttagcagttaaaaacggaatcagcaccttttcccccagtgaaaacggatgctgtttttcgcgccaaggctctgacgagtaagacaaagtgccgccggtatcaattaagacacgcccccgctgatgcggagcacctacaaacatgctgtcaccctgtccaatatctatcatatccacttctccttcggaactaagacacggatatataaagagcagaaacagcaccgtgcagcaaatgcctccggttaccatcaactgcgacaaggagcgtttttcaatcgccataagcaataggatgatcgtgaccgtgaataaaaaaagcaaaacaggtgcaggatgtgcgatcataatcgtgaacacatcaacatctgcaatgtttgtgattagcctattggtccagcttatcaataaatcaaaccagctgaaaaacaatctcccaaacgaagcggaaagacttaatagaagaacacctgctacagctcccggcaaaatacagaaggtataaaatggtaccatcaacatattcatcggtacgctgatgatagaaaactgatgaaaatgatatagaagaatcggaagcgagcccagctgagcgatgagtgatacaattgtcagctgtcccaaggaggttttaacctgctgaaaaatagaagaggatagaattaaagaaaaactgacggcgaacgatagctgaaaaccggcttcaaagagatgataaggattgaagagcagaaggacgatgtatgaaaggcaaattgcagttgcagagtggacacgccatttgacaaggcttccagctaagtaaacacccgacatgagagcggcgcgtagcactgaaggagcagcgccggtcaacatcacatagagcggcagaaataacagcaacagaattgacgccttttctctagttataccaaggcgaatcatgatataaaacaaacctgctgtcaaaatccccacgtggagtcctgatattgccaagagatggacaacaccaagcttttgatacgcggtaagcacttcatcctccacataaaatctgtcaccaactgtaagtgcctgtacaatccctgctgaatcaggaggcaaaaggctgtttgtgaatgatatgatatgttttctcaagctgagcaccttgtacttaaaattttcaggttcgctgcagttttggatagacgtgacagagtagttccaatgaatatgctgccgataaagatactcgttataatcaaatgcacccggcacagttgcgtgattcggttcttccaatgtaccagtcaactcacatgacattcctggttctatgtataacagctgttctttttcaccagcagactgaatgcgatacgcagcagcccatttttccttatcaggtgtctcaaccatcatagacatacggtcgccgtcaattttgggaatagtgtcaatcactgccttgaattgataggttccctgccgataggaagagacattctgagaatctgtgactgcatacagtacaaaaaacaatataaaagagaagaaacaaacaataatgagaaaagcgtgcctcgttttgattaaaatgatgaggagaaagaggatgaaaagaaaaatagcggggaaataagcggcggcagtaattccaaccgttgccgaagctgccgccataggcaataacaaacgcgaattacgcattcatcacacgtagctcgtgaaaagtgtattcgcctgttcatgtatctttttcaattcttcctccgctaaaccggcatcggccaatttccctattagacccgctacaaatgaaagcttttccctgtttttcagatcaacgatcatttcatcgagttcaacctgttcaactgttacacccgcctgttcaaataattcctgcgcatacggatgtgttttgtaatcctcagcataataaaccgttttgataccagcttgaataatagatttgcagcattgaatgcacggataatgcgtcacataaatctcggctccatcagtcggcaccccaaacttagagcattgaagaatcgcattcatttcagcgtgaatcgttcttgcgcaatgatcatctatcattaagcatccttcatctgcacaatgtacaccgcccgcgattgacccgttgtagcctcctgctatcatgcgtttgtctctgactatagtagcgccgacagataatctcggacatgtgctgcgcagcgccaataaatggctttgagccataaaatattgattccatgaaattcgttccacgttgttccctccaaatgttgtgttgcctgacctttagtttacctatcataatgcatgaccgtcaaatcactttactgtaatggaagactttattttctcaaatgacttttcacctattcctgaaaccttagtgatatcttcaattgtttggaaacgcccgttttcttcccggtatgcaataatagcttcagctttggatggccccacccctgagatgccttgtaactcctctaaggttgctgtattgatattcaccagcggccccttccctccatcgctttggacagaccctccggtaccttgctgcactgctgtttcctctccctttttcgggatgtacaccactgtcccgtcctgaagaacctcggccaaatttacttgcgcttcgtctgcttgtttactggtcccgcctgctttctcaattgcctgagatactctgtcccctgttcgcatttcataaacgccaggatgctgaacagcacctttgatgtctatcacaattgtttcgcttgactcgtcgttgtttgcttcctgctttaccactgtattttctgtctctgttggtacagcttgcttcaccggctctttatttttccctgtggccagaaagatcataatagctgtgaaaacagccgcagaagccgctaaaataattgttttcttatgctgattcaaccaattcatcgtgcatgttccccgctttcgtcatattttattttcataacacatatggtttagaggataatagctcaaaggaggggaaaccattgaagataggctttatcggcacaggaaatatgggtacgatccttatcgaatcatttattgaatcaaaagcggccgatccctcaaacataacaatcacaaaccgcacaattgaaaaagcgttgcacataaaaaaccgctacaacagcatcaacgttaccgaaagtctcgaaaagctcgtttctgagaacgagatgatttttatttgtgttaagccgcttgatatatatcctttactggcaagagcgttaccttatttaagaaaagatcatattctcatttcaattacaagccccgttcaaaccgaacagctcgaacaatatgtgccgtgtcaagtggcgcgagtgatcccaagtattacgaacagagcgctggcaggtgtttctctcgtcactttcggcacaagctgcgacgaatctgcaaaaacgaaaatcaatgagctaatgcagcatatctctcatccgctgcaaattgaaagtgacatcacaagggttgcatcagacatcgtaagctgcggccccgcttttatgagctatctgattcagcggtttatagatgcagctgtcacggaaacatcagtatctaaacaggacgcgattttgatgtgtaaggaaatgcttgtcggaatgggaaaactgttagaaaccgaattgtataccttgcctgcattacaggaaaaggtttgcgttaaaggcggtgtaacaggagaaggcattaaagcgctggaaagcggtgtgcagaatatgtttcaccgggtatttcaaaatactcatatgaagtacgaggaggatatttccgcagtgaaaaagcagtttcatgtgtagacgagtatgtcatactttcgtctgtactgcaaaagcataaaaaagcattttaaaaaaccatcgttttaagaaacgatggtttttgatttctgcgccttgaaaaagaggcgttctgattgtgctgatggctcggtatccgtaaaatcagctgtcacgcgatggagctgaaagccgcagttcttaagcatttcttcgtattcttccaccgggaacgttctttgctcgtgtgtctcatcaaaacgatcatacgcttctccgttccacacaaaaaacgacatatcatgaatgacagaaagctcgtcacttccggcaaagctctgccaaatatagctgatatcttcgtcctggtcagcaaatgtgctatccggaaagacttccgcaattttataagatgaatgaacatcaaacagcaaaatgccttcaggctttaatacccgaaatacacttttaaaggtttcgatcacatcattttttgtttttaaataatttaatgagtcacagcatatcacaacagcgtcaaattgaccgtcaaagccggtaatctctctcatatcctgctgaagaaataaaataggctggctactcgataccttttgctgggcgaaagaaagcatctcttcgctgagatcgatgcctgtaacctcgaagcctttttcggcaagccggatggagatttcccccgtgccgcatgccagatcgagaatacggcctttttccgggagagatgcttcaatccattttgtccattgatcgtaaggcgcgtgtgacattaactcgtcatacacgcttgcaaagccctgataaatcattgattcattccaaagtcaagatctgcgagcggagcgtctccccacagcttttcaaggttgtagtagcttctttcatccttgtggaagacatggacaattacatcgcctagatcaacgagaacccatcttgcttcatcaaagccttccatctttttgacttgaatgccgttttcatcagcttgatccttgatttcacgggcaatagcctgtacctgtttatctgaatttccgtggcagatcagaaaataatcagcaaccagagaaataccttccatatccagtgctaaaatatcctctgcccgtttatcatcgcaagccgcagctgcgatctttaaaatggacttttggttcattcacaaattcctcctgttcagctgccagacacaagccagttatacgttaaaaatgtgtctggaaaaaccggttgattttttttcataagaaaaaccattgtatttttaatggactgaatcagcgcttgattcaaatctgtctcagcaagcttacgcacctcatcgacaccgggaaatgcccggtttggctcaatgtaatcggcaacgtaaatgactttttctaaaagtgtcatgccggggcgccctgaggtatgatacctaatggcgtcaagaatgtcttcatcttgaacccctgcctctctttggaccaaataagcgccgaccggagcgtgccagagctccggattatgatccaataaatgcgcaggcattttttcacgcgcaataatttgtttcatttcttctttcgggcggaatttggcgtaatcatgaaagattgccgctgtttccgcttttttagaatcggctccaaaacgctccgcaagttcgatcgccgtgttcatcacgccaaccgtatggatatatcggtgttcggtcaattgctgcttcacgcatgcaagtgcctcctcacgattcatataaaccattctcctctacatacttcttcactttatcagggattaagtagtcagtgggcttcttgcttttaaaccgttcccttatcatagttgatgatacctcaaattccggaacgtctgcaaagagaagcggataaggggtttcaacatgaaaaccggggcgctttactccaataaattgaatgaggttcagcagctcgtccagcttataccatttcggcaaatattcaatcatatcagcgccgataataaagaacagctgatcatttggataacgctgcttcagtaaagaaacggtatcaaaggtatatgatggcccttctctttccatttcaacaagctccagcttaaaggacggattagattgaattgcaagctttagcatttccacgcgatgaaagctgtcggtatagtcttcgttctgtttatgcggcggaatttgattaggcataaaccaaatttcatcaagccccgcctggtacagcacctcattcgccattaagaggtgaccattatgcggagggtcaaacgtgcctccgaaaattccgattttcttcatttcaaccacctttaaggaagctcgatttgtttattttcctttgattccttatataacacaatcgtattgccgattgtctgcaccaattgagagcggcttccttttacaagagcttccgctacatcgtttttatcctcttcgcaattctgaagcacgctgactttaatcagctctctcgcttcaagcgcctcagtaatttgtttaatcatgttgtcgtttactccgcctttacctacttgaaaaatcggcgttaaatgatgcgcttttgaacgcaaaaaacgtttttgtttacctgttaacattctgttcctcctaattttcctattacaatagatctcattttttcaatatcaggctcttgtccagtccacaattggaaagacaatgctgcctgttcaacaaacatgcccacaccatcgagtgttttcaagcctttttggcttgcttcttttaaaagggccgtctgtattggattatacacgatatcacatacgacggcactgctcgcggcacgctgtaatgaaagcggcacatcgtccacgttcggatacatgcccacagacgttgtatggatgataacatcatactgctcaagacgttcttctgcttcttttatgcttaatacttctttattgtgaaacgagggagtagcttctgtaagccgctttgctttttctaacgtccggttgcaaatgtcaaattttttcggggtatttcggacaattgttgtaaaaatggctctcgccgctccgccagcgccgatcattaagaatgacagttcagagatgggcttgtctaataccttcattaatgacttcacgaagccttccccatcggtattgtatccgacaagcttatctccctctcttctgaccgtgtttacggcaccgagcacttttgcactctcatcaatatgatccagataatccataatggaaaccttgtgcggaacagtcacattgattccttgtacgcctagagctcttattccttttaccgcatcctccagatcattctcttctaccttgaaggcatgataatgtccgtcaagcccgaggtctttcaatgatgcgttatgaatatcaggtgacatagaatggccaatcggatttccgataaccccgtacagctttttcatactcctctccccttttcttaaattaatgaacgccgaacaaatacatgaacgccttttggcgcgtatgcagttacctttttatcggcgtcatggacagtaacccagcctaacccagagaaaacgatatctgtctttttgtcttttatcgtaaacgtatgggcgaccaattccggaaactcatccatttcatctttacccggaggtgtgagcaattcccctgcatgcttttcataaagcgcgtctgcattttcaagttttgttctatgaatcatcagttcattcggcatatagcaaataaaaggagatctttccccagacacataatcaaaccttgcaagtccgccaaaatacagtgtttgctgatcattaagctggaatgtgcgaggcttcagctcctttttaggagataatattttcagatcctttttattgacataatgcgccatttgatggttgttgataattcccggtgtatcataaagcgatgaaccgtcatccagcgggatttcaatcgcatcaagggttgtgccaggaaattgggatgttgtaataatatcttcttcacctgacacttctttaataatccggttaataaaggttgactttcctacatttgtacatccgacaacatagacgtcttttccgttgcggtaatgctcaatcgcgtcaattacttctctgattccctggccgcgtcccgcactgaccaaaaatacgtcaaccggttttaagccaagctctttcgcttcacgcttcatccattggatcagacgctctcttttcagtgacttaggcaaaatatccgctttattgccaactaataagatagggtttccccccaccaagcgctgcagcccattaatccagctgccgttaaaatcaaaaatatcaacaatttttacgacaagagagtccgtttctccaataccgtgaagaatgttcaaaaaatcatcatcagttaaggagacatcttgtatttcattatagtttttcagtctgaagcaacgctggcaaatcacattttctttcgtaagcgatgcaggcggcgcgtaccccaaacctgttttgtcctcggtttggatcgtaactccgcacccgatacaaacaaccttttccatttcttactcctcccactgaatgtgcccttttcgtttgagagcactcagtattctgcgttcgacctggcggttaaagcgcgtaatgaatccgtcagaggaagcgactggcacgaccaaaatcgtatggtagccgtttcggtttcccccgagtacatcggtcagcagctggtctccgatgacaacgcagtcctcttttttcagctccatattgcgcaccgctctattaaaggctttacccatcggttttcttgctttatagatgaatgggattccaagcggttctgagaaaagtttcactcttctttcgttattattagagacaattgtcactttaatgccgtgttccttcatttcttcaaaccactcgatcaatcgcggcgtcgcgttcggcctgtcccattcaacaagcgtattatccaggtcagtaataatcccttttacatttcgttcctttaatttctcaggtgtaatatgaaaaatattttttacaaactcgtcaggtaaaaaaaacttttttaacaaaacccgcacccttccctttttctttctttcaaaatgattgtcgaaaaaaatcgaacttgcgcctaaagaaaaactgagcaaaaaaatttcgacaaaaattgggtttcttcaccaggtgtggataaatttacacacactatccactcttattacatcactctttagacaaattataaacacgatactcacaagttatccactttttggtgtggataacagaacgattgttcttatatgcatttcatggtagattaaagataacttcaacctcagatgaacgcaacttatcattgtatgcgttaaaatcatgaatgattccaacttttaaggaggtgcctctcccattaattgggttcctagcatgagaaaactgtctgatgaattactaatagaatcttatttcaaagccaccgaaatgaatttaaaccgtgactttatcgagttaattgaaaacgaaataaaaagaagatcgctcggacatattatttccgtatcttcttaataggaatttgtctattttttccgggcgtatttcctttttttactcagatgactgatattatatcactttggctgcgcgctttactactattttcagcaaaaaacacccctaaaaagaggtgttttaaagggccggttattatgctaaccagtatatgccgcccacaacaaggagaacaacaactaaaacaacaataaaagcgtatccatatgctctgcctgcgccatacatgtgaagcgcctccttaataaggttttataacagcctatgtaggagaaataaatcggactaggcggttgtccggctcaacgctgcaggatctgcccatcttgtattccttcatatacgatccttgcccctttaggtgtcatatgatttccagaaggatctataagaccagattggataagcgcttcatcagttgcttttccgccgtctgcttctataaaatgcttccagttatctacaagagggacatccaggcgcttcgacacatctcttgtaatatcgttatatgagttgtgccatttccttgctccgccttttggttcaaaagcagctgcttgatatctggaatagtaaaacaaatgatgcttcccattaccttctataattgggatacacgtcattaagattggcttgatcccgtgttttctgctttcttcaataaaataaaccagattttctctaaaacgctgcttcgacactctcggtttcccctcagtcagtatggcagcgtcattggtgccgaacataataaacaaatacttcggtttttgatccagcacatctgtctgaaatcggagacgggcatcctctgtcgtctgtccgccgattcccgcattgagtatatcaaggttaccgcgctcagctgtttttaatatattgacccactgctgtgcttttggataatcgcgataatcccaattagagccacgcgtattgctgtcaccaaatgctacaacgtcttcgtatccccttccctcgcatcctgctgtaacgaacagcagaaggaaaaggatgataaaatgtttcatctttacacccccaaaagcctcaccttaatgttatacctctgtttctcttcgttcaatgaagagtttttcgctatcactgttttttcctatagttaacgtgtccccctcagtgaatatcattctgctttcattgcggcgcagctgatgattttttaaaattcccttctttccaatctgaaaaacacacaaaccaaagaaaagaaaataacctaaatccgcactggaaacaggttatccgttaaatcctgcatttactttaacttcgatttaagcttggcctttgtttttggcccataaatcccgtctgcagttaatccgttcatgagctgaaaacgcttgacggcattcgctgttttcggtccgtaaactccatctatgccattgtttttggctcccttatcagggtaaaagtgaagtgcagttaaagccttttgcagctggagaatgtttgtgccctttcgataaggcgaagtgagctttataaccccagacggcagaggatatgatggtaaaggttcttttggaggtgtatccgaggaagaaattccgtttataaaagagttccagtggttcaagagtttccgcggacattctttcccagaccattttttgtggggaacaacacgatgtaacggaatattgttttccttcatcagctttctgatcagccactgggcatttgatgttgctttttcaaaatcgccatcagcattttcgcagatttcaatcccgatcgatttgcggtttcctgtcccgtttgtaccgtctcccgcatgccagccgttttcatctatcgggagatgctgataaatgactgaatcgtcaactgtaaaatgccagctttcggatgtgctcgggttttttacaaaattggcgtgcattttcgcatcagcgccttttgctgtattcgctgtattatgcaccgtaatataagcaggcgtcatcgcatagccaggacgattatcatttgataccggtataaaatccttttttatggttaccatttctatccctccctattattaagaatgcagaaaacagagagatggacagccttttttatgaggtaaaaaagaattgtgttctcaacctggttttcagttgaaccgctgaaatggcaccagttatactaatttagatgacggaggttttggctcctgacatcacctaagttgggagtgaccatagacatgttaaaaaaagtaataggtatacttgtgattatcgctatcattgcagtcggtttttttcagaaagaagcttggcttgatgcaatcaaagcaggagggatgttttccgttttatttagtatgctgctgattgctgccgatgtttttttcccaatagtgccgtttgctttggttgctgctttaaatggcgcagtgttcgggactgcaaatggaatttggattacactgaccggctcaatgcttggtacaatattgctgttttttctcgccaggtacagttttagagattgggccagaaaaaaagttcaggcctatcctgccatacaaagctacgaggcttccttcaacaaaaacgcttttaccgctgttttattaggaaggctgatacctgtcataccttcacttgtaatgaacgtgatctgcgggctgagccaggttcgctggcatgtttttttctttgcgtctttaatagggaaaatccccaatattgttgttgtcactattgcaggtgccaatttcaccagcaataaattattgtctatcagcatttacggtgcatatattctgatcatcatgctggtcatttataaaaagttccctcatcttctgaaggtgccaaaaaaataaggaggcttgttggcccccttactttttttctgtcgcatggcctccaaattcatttcgaagcgcagcgaccacctttcctgtaaacgtatcgtctgttaaagaacggtatctcatcatcagtgacatggcgatgaccggagttgccgtctgcagatcaagcgcggtttccaccgtccattttccttcacctgaggaatgcataatgcccttgatctgatccagtttcgcatccttagcgaaagctcgctcagtcagtcccataagccaagaacgaatgacagaaccatgattccacactctggcaaccttctcgtagtcaaaatcaaattggctgttttcaagcacttcgaatccttcaccaatcgcggccatcattccatactcaattccattatggatcatttttaaaaaatgtccgcttcccgcttcaccagcgtatagataaccattttcgacggcagtatcacgaaaaagcggttccacaatctcccatgcttcatgatcgcccccaccataaaacaggctccatgccgtgcgccttccattccgcccgacgttccggcatcgagataatggatacccgcttctttcatttgattgtagcggcgaattgattctttataatgagagtttccagcttcgataatcatatcgcctttacttaataaaggtgatacatcacgcaaaacagcatcgacaatgccatgcggtaccataacccataggatacgcggcgggtctaataaagaaattaactctttaagattcgttgtcccctcagccccgtatgctttcagttcatcaacagccgcttgatttacatcatatccaaccgcttgatgattgcggtcaatgaattgctttcctatgtttatgcccattttccctaagccgattaatccaattttcatatctgttcctcctgattgtctaaaaagcctttactctttatgttccctttggattgtattgtgatacgcagaaaacaaatggggcttacatcgtctgcgcatgtaaattttatttttcatgactgactgtgcctgccagttctattactgaatctctttatatccataattatcactttatccttgatttaccatcagtttaagttaaaatatgggaaggtattcgatttttttagtaaaaagaaggtgacatgttgcagaatcaatctcatactcttatcggagttacgaaaaccgctgtattctttttatacgctgcacttgcaatcatcggttttgcaatcgggtattttattccgcagattgcgaaatgggcattatccctcccctggatccctcttgaaggaccacttcggctcattacctcttttcagggatctacagcttcatttatcactgctcttctcggtatgtgtgcggggatttggttcgctcattctgttattgcaatgctgctgtctgtcaaaattacagatcacacagtggaattcatcaaaggaaaaaaagtgcaaacaattcattccgatgacatcgctcttgtatttatggatcacaaacggcttgtcctcctgggaacagccggatatgaattggtacgggaagaaattgatgaaaaaccagtaaacgttgagaaggcctttagacagcatcattacgaatgggcaacagatggtgatccgtttaaagatcaatttcgccgatggattcctgatgcaccagacctatcgcaaggcgcccatgccttattaaaagctcgtcacaaagcactgcaggacgaagaaaaagacgatattgaagaattccgtctcgaactggcacagctgggcatcgttgtacgggacgaaggcacacgccaatattggcgaaaagcagaaacctatcccccgaaaattcagctcggcgaaggattgtaacaacagaggctcaagaaagagcctcttctttattactgcacaataaacagcactctggtgccgtcagggtagctgctcatttgattccctacccacgagccggcgccgcgattatcagaaggcgtcacatatcggacatcagcccctgcaccgccttcctcgcagaccgccatcggccactcatcccggtcatagcccggcttggtcgggattccctttaaagattcctcccgccttttgtctgctccatctctgtcaatggtacaaatatctggatgtccctctgcaatcgcatccctaatatgactgccggtttccggataacgagacagcggaaaatataacactttgtcatacgaagatgcgccttggatctgttgcggaaccattaaacaaagaagaactgctgcagcaagaaacaggcctgccatccattttttcattcccatccccccatacctttgttcatttcaatgtatgggcgcttgatgaagaatatttttaacatttgaagttagtatgctgcttaccaaagccggactcccccgcgagaaatttcccggtacagacacagacagcctcccggtcacatacatttacatataggcttttgcctacatacttttgtggaggtgacgatggtgacaggtgttttcgcagcgctcggctttgttgttaaagagcttgtctttttagtatcttacgtgaaaaacaatgcctttccacaaccgctctcaagcagcgaagaaaaaaaatacttagagctcatggctaaaggggatgaacatgccagaaacatgctgattgagcataatcttcgcttggtcgcccatattgtgaaaaaatttgaaaatacaggtgaggatgcagaggacttaatctccatcggaacgatcgggctgataaaaggaattgaaagctattccgctggtaaagggacaaagctggcgacgtatgctgcgaggtgtattgaaaatgagattgtaattacaaaagggggtgcatactcctctttaatacgtttaaatatattcggtgatctcttctcctctcttggtttattattgaaacggaaacaaaaatccattacactattgctgatgcaccaacgggtgggaggactcgccatgaacaaaaaagaactgctcctaatgaatttcaaggacttgtttaacaagatggcttggcttaataagccaaagatggaagtctgtcttaaagggtataagccttctgaagtacattgtatagaatccattgaacatggaaatactaatgtgacaaaactagctgagtccctttatatgacgagggggccataagtaaaatgactaaaaagcttatagaaaaaggcttaattgaaagctaccagaagccagataacaagaaagaaattcattttaggcttaccgagcaagggaaaaaaatttataaaatccatgatgaactgcacaaagagtttctagagcgcgacaaggcagtatttgaacaagtaaccgaggaacaatttgactttatgattaactttgcggaaaagtataatagacatttggatgtagaaataaaaaaacaaggttttgatattaagtcggaataaatttaaataatgaaaatgcaaccacaggcagccaactctattgagtttcggctgcctttttattaccgtcattttgttgacgaggaaacaaaattatgttattttttgttgactgggaaacaaaaaatacaacttttgagaggtgaataatatgttaaaagacaaagtaaaggagccaggattaccaaaagaaatcctcatggcttcctgggccattgcacttggagcaattgccccaatgcttgactcaactatggtgaacattgccatcgacaaattaaataaggatttcagtacgacgttggataccattcaatggtccattacaggttatgttttagctcttgctattgcagttccagtatccggatggcttatgaacaaatttaatggaaagaaaatcttaatcggcgcagtcattgcctttggtgtaacttctgtttttgctggaattagttgggatgtttctagctttatcttattccgtttgcttcaaggatttagcgctgggattattactccgctcatgtcaacactcttggttaaaacagcaggtccagagaatataggaaaagttatggctatcgtcagcacacctatgattttgggcccaatcttaggacctgtaatcgggggcttcatcgttcaagctacatcatggcattggattttcttcatcaacgtgttcatcgttttgattgctgcaccactgatgatgaaaactcttccagactttgagccattcaacaaaaatagtaaacttgatatttttggaattatcaatctatccttaatgagtgcagcaatgatatacggaattacaaaagcagcagaccatgcatcatttaacaatagcgaaacaatcctatgggtgggcatcggcctctctttagctgtaatttacatcgtatataatcgaatcagaaaaaatcaaaccgtactccctttaaatttgtttgcacacaagaacttcttagcatccagcgtcgggttattattagcgaatattgccgtcatgggacccatgttaatacttccattgttctttcaaaacttccgtcatttcacggcaatcgaagctgcgcttgcattaatccctcaaggagttgggatgctcgttactcggccaatgattggaaaaatgattgataagatcggtgcaaaatacgtggttattgtcagtctcgtcctttcgcttatcggatctattccgcttatctttatcaccgataaaacaagtatgatttggatttctatcatattattcatccgcgggaccagttttggaggaattatgcttccgttaacaagtgatgcttatacaggacttgacagcaaacaacttccagaagcaggtgtcggtattaatattattgaaaacctcggtgcaagttttggttcagctgttatcgcaactgttgtcgcaactactatacaaggattgcaaccaacgattgcgaatggcttaaaaggttaccatgccggattcttagtatccaccattgtccttgcggtaatcttcatcccaagtctatttctcacacataaaaagaatgcacaataaagaaatctgcatactcgactgccgaacggtttgtttggataacttgtgatacatgtgatgtgcaccagtttcataagcccatttagaaaggcgcttactaatttgattggctatctgttttcttcgatgtctggatctacttcagaggtttcaattacaaaaagagggcaataaccctctttaatacgtttcaatatatatagtgtcagaatccacaacggtaacttctttcacgataaagttaacaattgtttttttatcatcaagggttaagttatctgcaccgattgattgaaaatagtcgatggctctttttagagcattttcacttgagctcgtatcatccaggactttcatttttgattgaatttcgctacacttttcagtaagctggttttgctttttttgcagctcaataatttgcgctttgatttcatctatgtctaaatcatcgtcatcgcttaggctgattagcgttaaaagacgcttgcggcctttttttgttttctctatctctttttgaataagttctaattcatcagacaggtgatttgattgttcaatctctttgaaagaagcatacttttgaggatttgtgatgaatttaaaaatttcaccccatacatgccggttcaatttattctcagacatttcctttccgcagccgcggtcctttgcgccagaataatttttccggcaagtatatacatagtagtctttaccatgtgattttcttttcttccctgtcatggtatttccgcatttcccgcatctaaccaaacccgataacaagtaattgtgagggctaatgcttaagtgttttcttttactttgacctaagagttcttgagcataatcccattgttcagctggaacaattgctggaattgccacagtgatttgctcctcttcaggccttattttgattatagatttgttccctgcctgttttgaaacataggaaccctctgtatcatatttatactgtttatgttcacccttataagaagagttcattaatatctgtcgaacaacctgcctgtgccatactttggcacctttttttgttttaacccccatctgagttaaatgtagagcaataccatttactctgccgaaaaaagggcttttatgatcggtgaaatagttaaaaatcatcctaatgatttttgcttcctcttcaaaaatctcaagagttcttttctctttaacaaatttatagccatatagtttggaatctttaataatcatgccttttttcattttttgaagtcggccgcttgatgtccgttctttgattttggctttttcaaattctgagattgctccacgcattgcgaaaaataattgaccttctggagaattggcgtattcaccatttacaaataccaagggtatatttcgctttcgcaattcgtcatcaatgataagctgattcattaatttccgagaaagacggtcaggatcataacaaatgacttgacttataagtcccttgcttgcatcctccctcaagcgattcaaagccggacgttctaaaagctccccagaaaatccttcatcggcatacttcagcacatccttagtccctgctttctttatacaggcctcgatctggctgtcgatgctcgatcccttgatcgcttgttcctcggtcgatacccttacatatattgctatcaccctggatctccttcctataaagttttattaaataatgatagcaatcgttaatgcatttgtcagcttgcggtccctcgatgattatcaccttcataaaatgcatcaccccttgggtaatgctatgtaaaggcggtttgtcctaatgaaatcattttcaatgagtgtgaaaaaagcacttaaaaaaccgatagttaaaacgatcggtttttcgacatcgcctaggccctcaacatagtaaattcatatcattagttatgaaagcttattttcactacactccttatatttaattgccatcatttctatacgatttatatgaaatatggtaaaaaatggttagctaaaacgataaagataccaacctgttcatttggtatccccattcttcaagtacctcaataaatgtaaaccactgaatatttttatgacattgcacgtgtcaatgatgccaattcatgaactcataaaggagatttaataaaactcccaaaacaaaagggatatcaatatagttggtatcttctttattagtttgaatccctcaataaagtggatgcttatcataattacaaaaaactttatttgaagcactgaagtcattcattatattgttgtaaagataacactatagtccccttcttacttcataaacggttgttatatttaacttcttaattaagggacattttctgtttttagattcgttatgtctttttctgttacgtaaagaatggagataaaccaatagaattaagtgagctttaaatgcttcaaaaagctctgataacaaatctctttataatattcatgtgaatttatatcttcactcattagccattgaatgagcaatccatctacaatagatcgcattgtttttgaagctttttcaacatctatactttggtcaaatacgcctgtttcctgtccgaaaataataatgttagatgtggtgccccagcactgttgataaaagctatggttaattttcctgtacgtttcatttcgggttgcctgagacaagaaatctaaataaaccttataaaacttttcattttcctcgggagagacaaatattgaatttacataagctttcaacttatctagtggcgtagattccgaatccactgcttccaattcatgtttataaattttatttgtaagccactcaagtagttgagaaagggtatcttccttattatcaaagtaataatgcacgacgcccttactaactcctgcgtgatctgcaatactttgtagtgtaactgaattataaccttgtgttgacacagcttggaaagctgcccttaatatctgattctttctttcttctgcttttttcttcataataaacctccagaaagctaaaccttcaattagtatacaacagttcatgaaatccacacaaaattattccgaccagacaaaatagtttgaccggtcagaataatttagtatactaaaagtggtttcacatcaagatagcatataggaggatttataaaatgaaagacgaattcaaggctctagttgtaaacaaagttgatgatgaattttcaattaaagtaaagaatgtttctccagcgtttttaccagaaagtgatgtccacatccaagtacactactctggaattaactacaaagatggacttgcagggaaccccaatgggaaaatcgtaagaaaatacccatttataccgggtatagatttagcaggtgtagtcatttcttctaatgatcctcgctttaaagagggggataaggtgattgccacaagttatgatataggtgtttctcattttggcggttttagcgaatatgcaagtctccctggagactggattgtacctttacctgataatttgaccctcaaagaagcaatgatagtaggaacagctggcttcacagcggcactatctattcaacgtctagaagaaaataacctatctcccgaaaaaggaaaagttctggtaacaggagcaacaggtggcgttggtagttttgctgtttcattccttaactctctcggttatcaagtagaagctagtacaggtaaagaatcagaatatgattacttacgaaaacttggagctagtacaattatttcacgggatatgacctatggagggaaggttaaagccttaggatcacaaaaatgggcggcagctgttgatcctgtaggcggggaacctcttgcctctatcttaagccaaattcaatatggaggttccgttgctgttagtggattaacagctggaacaaaactgccaactactgtttttccattcatcttaagaggtgttaatttacttggaattgattctgtatattgtccaatggaaacacggttaaaaacatgggatcgtgtagcaacagattttaaaccatctaatttaaaggaatttatatcacaagaaattactttagatcaacttcctaacgttcttcctgaaatattggaaggacaagtaagagggagaacgattgtaaatatcgtatgattattcatcagaactcatccagttgctaaagatgaaacaatgtcttaaaggtctagtaaagggattctcaacaggaattcctttacttattatagcttactttatgttaatgcaaaaatataaggagtgatcctccccattcagcttacacagtcttaatgatatgaaaacgcttattcatcgtacattataaatgtggctcctagtctggagtttcgttatgggcaaacaaaactcaaataaataggaacccaccttgtcacaataaactcaatagactaatgctgagaagtctccttacttacttcaacatgctcaaaaccctgtaaacaggttcccttggggagaagaaacatttgaaaaagcgaaacgcgaaaacaaacctgttctcgtatctattgggtatagctagctcgggtagctatacgcacatgtcattggtgccatgtttcttaaaataaccacaaaaggcaaccagtttcggctgccttttaataattttattggaaatttttagaaagctagattcaaaaactttttctcttctaatttaaatactgttgttttttcttttgattcattccattttatcttgccctctaatttgtgtcacttaatatcttcctcgggcatataatcaaaagttgaaacgtgattggtttttttcccaccgtctacaaaccgcgagttctgctgattaagaaatggaaagataaaaagctagatcaaatcatagaaacaccttattattgcctttcaaaatcctctgcataaatgaactcaactttttgactgctctcttcgtattccccttaaaatttaataatcactttcccttttggccgtccatttgcgactagttctagcgcttcatttacgttgtctatggtaaatagtgttggatgaattgctggaacaatgttgttttcttcaatgattttagtaatctctttaagttgtgcaccgtcagaacgaacgaagataaaatagtatcctacgttttgtttcttggctttgcgatcatactttgcgcccgcaagggaaaatagcatttgtttccacaatggaaaatttcggtcttttccgaagcgtttatttggtcctgtacggagagagagcaatcttccgcccgatttgatgatactcaattcactgtcaaattctttaggtcccagtgtatcaatcacgtaatccacattcgacaacaagtcaacatagttttctgttgtataatccaaatattggtctgcacccatttccaaagtgcgttcgcgcgcctctgagctgccgctaacaatgacatttaggcccattgcctttgcgattggtacagccatttgaccaaagctgcctgatccacctggaatgaagacagatttacctggctgtgcctcaagttcttcatgcaggccttgatacgctgtgagtccagccagtggtgcagcagcggcttccacgtaagacaaattttttggcatgggtgcaattgcggcagcgtcaattgcggcatattccgcaaaagcaccaattttttcgagggggagacgtgtatagatggcatctcctacgtgaaattctgttacattttttccgactttttcgataactcctgtcaattcattaccaagcgttaatgggaattcataatcttgaatcagtttcacgctgcctgtaattattaacatttctagtggattgactgccgcagctttgacctttaccaagacttcgttttcatcgatttctggaattggaatgtcattgactttggcatggatattttttgaatacttggtgatctgagctgctttcatgagtgttttcatatttttatcagcatcctctatcatattacatttattaggtttttacctttttatataatcgtttaggtggaggggaatcttactttaagcgaagtctgacttccaattttatgattaacccgccacctaaacattcgtgatttttagaacgatcattctcaaatgattaaattttttaggtccgatactgtaaataaatgtttctcatcttcctagtgttattgatatagaacatcgttattatatagatttaataacttgaaagattacatctctagaatcggatagatttgatctcttaattgaaattcatagttttcgtctacaattcctactacttgattactatcataaagctccatcataaaactcgccacttgctcaactgtgtggtacatcgggatatttgctttgtaatcaaattctgtcgtatcagatgcatttttcatgaattctgtttccgtgattgctggtgctaaaactttcaccttcattttcgcacctttgcgttccagttcttttgcaagcccttctgtaaatgcactaacaaagtatttagatgcagaataagtaatactgccaacagcaattgcatatccgagggctgatgatacgttaattaactgagttccctctacatccgaataatcacgtacaaatagtgtagaaagaattgttaaggattctacgttgacacgtaacatggtttccactttatctaaattctgatccgtgacagaagaagattcaccaagcccggcattattaatccaagtctcaatttgatattcctttaaattatcatacagtgtgtatgcctgagctgtgacagataagtcacatgtacgaatcataacatccaaatcgggattaatattctgaattgttgatttaagctcttctaatttatctaatcttctagctacaataattaagtttttgccgcgagcagctaacgctaatgctgtctcatatcctatacctgagcttgctcctgtaataactgtatacttcatattattctctcctcgaaaacaaatttttttttattagatcatccatataacaaaatagattcagtctaatgtcgacaaagtcaaatcaataatgttttctaatttttcctcatcatttgtcgtttttgctaatactcgtatccctacgagtgaattatgaataaattgagaaagccctttgatatcatagtgtttagaaatttctccttgttcttgaccatgtttcagtagatcaaataagaaggtttctgtctttataaaagtctctgtaacttttttagtaaacgatttattccattacgagatcttggctagatgacagatcataatcaactgccactacactcctggtcaccctcaattaggtcaatgccctgttctttgctgtgtggatctgaccatacgggtcaccattttgcgcggcatcaaccgtggaaggaatgccatgaatcggtttcgagccccgggcattattaacgtcttgccacgtaagaagcctcggtacccttcctcagccacctgcccggcctccatgatagcaccactctggaacaacttcgattcaccaatacccgaacgatcaacgaagccggttgacgtcagtcccggacatagagccgtcacagtcacccctgtaccgctcagttcgttctccaaagcctcggtgaacgacagcacgtacgccttcgttgcgtagtaaaccgacatcataggtcccgggaagaaagccaccaacgaagccacattcatcacgcctccttggccccgtttgaccatatccggcaagaacagtttcgtcataacagtcagagccttgatattgacgtcaatcatattcgtctcttgttctaactgcgtctccaagaacgtcccgtacaaaccgaagccggcattattgacaagatagtcgacgacgatccccttctccttgagctccgcaaaaatctcctccggcacaccgggtgacgccacatccttggcgatgaccgtcgcttgactgccatatcttttccgatattccttcgcgagctccaaaagcttaccctcgctacgcgccaccagcaccaaattatatcctcccttggcgaaacgatccgccaactctttgccaatcccacccgataccccggtgataagaacagtttttttcatttgacagcacacctccatttttagtttgaacttttaaaacgttttacagcgtttcttactgcgagtttttactatggatgtatgttatccataattcaaatttttgtatcaagaggatttatacttgccgcatatatctcaactaagacctcgccattatttattttgggcctagggaagtaaaaatttggtttttcgccgtagttttcaatcgctaaagctttcgttacaatcctccacatttttatttaacgcacatgtatcttttcctaacgaacctaagaaaaaagaatatgaatatcccttccctagatgggatattcatattaaataaattattttaagaaaggataatctgtataaccttcttttcctcctgcatagagcgtgttttgatcaggttcgtttaggggagcacctgatttaatccgttctgcaaagtctggattagctagtacccaagtgcctactgtgacaacatctgcaagattattatctacatcagacgaaagttgatctagaggacgacctggacggttaacaagaagtgcttgatcccaaagttgacgcacatcttttaggaattgctcgtttccaaagtgcattaaatgcagatatacaaggttaagcttatttaattcacttattaaatagcgatacatctcaaggctattttccccttcatcaatgccttgcagtgttccttgaggagaaaaacggatgcctgttctttctgctcctatttcatcaacaactgctttagctacttcaattgcgaatcgagaacgcccctcaatcgtaccaccgtatgcatcttgacgatgattggagttttcactaaggaattgttggatcagataaccattcgctccgtgaatttcaactccgtctgcaccagcttcaattgctgaacgtgctgctaaacgaaactcattgataacatcttttatctcaagctcactcagttctcttggtgttgggacttctttcattccttctgccgtgaaaatttctacaccaggtgcaatagctgacggtgcaactgcttggcggtggtgaggtgtgttatcagggtgtgatatacgtcccacatgcataagctgaataaaaatatgaccgccttcactatgaactttagaagttacttttttccaccctctaatatgattttctgtataaataccaggtgtattagtgtaaccttgcccatcatctgaaggttgggttccttcgcttataattaaaccgactgaagcacgctgaccatagtactctgctactaaatcgctcggcgtaccatctggtaaagctctatttctagtcatcggagccatacctatacgatttttcaagtcaatgtttccaatacgaactttttcaaataatctgctcatatgaatactcctttttaataaaaattagaatcaagaaataaatttacgtgttctgcaaatagttctggaaattgaaacagatgcccgtgaccagaatcaggatatataatcagctgtgctttgggtaatttctctgctaagatgtaactgtttttagttggtaccattacatcattaacaccattagtaacaagtacagggtgtttgatgttttgtaaccattcataatcatgattagatttttgtttagcccattttgcaatggcttgtaattgtgcctcttttacttgttctgaactgtttacttttttctgattaaaaattctttgtagtgaagccattcctgcagatttacttgtttcggtttgtgcgtagaaaaagaacataaaatcatttattccatcttcttccgttccgccgtgacgattcattctttcaaaaatctctggatttggattaataccagattcaggcgaagtacctgccataataatttttcttactaaatctccttcttgtaaagctagctcttgtgcaaccataccaccaatggaaaaaccaagaatgtcaacttgttctaatccaagagcttttataaatgttgctgtatcttttgccatatcagtaattgtagtaggcgttattccatctgtctcaccaacccctttattgtcaaataagattactgggcgtttatttgcaatcggttcaagcatgtctggatcccagttttccatcgttcctctaaagtgaacaagaaatactagcggtataccatcttgtgtaccaaattttctatatgcgtaacgagttccatctgcttcaataaattctgattctgatggtattttaaagtttgtcatttttgtgttcctccttagaaattaaaaaacgattttataagtatgcattatgatggtttgtttcatgctaattttagaatgaacgttctaaatagggtaaaaaaaagaaagctagtccaacactgaaagtgctagagtaatgatgccttctaattcttttttactgtaattagtttttattagtactcttatacctaccaaattgttgtgtaagaaacgagatatgttatcagaatcgatttcttttgatatctctccactagtttggccccgttttataaggttattaaacatatcttcagtacggttaaacatttttgtaactatgcgtccaatttctttgtccaacaaagataattcaatggctgcatttactgatagacaaccttttgggtattgttcaatggaattcagtacgaaaataaaaacatcacgtatcgcctgtttaatggatgaagttctgctaattatgctttccatctcattgacgacgagctcttcatagtgattaagggaagctaaaaacaatgaacgcttgtcaccaaatgtgtcatatatactcctgcggtgtatccccatatgatttaccaaatcttgcatggatgttttttcataaccctgttcccagaaaagctccattgcttttcttaatactgctttttcgtcaaactctttacttctagccatttttttctccttaaaaaaatcaatgaaccaatactaacaaaaacaaaagtcataatccattgtagaatgaacattctaaaatgaactcatgaatttcaaaccatgattaaataatatcctttttagaacgataagtaaagaattataaatttaattatcaataatctctggaacaatgtgcattctcatttgagtagcaaaacagttagatctaacgtgtttcaagtatagcaaatttgagaacgatcggtaaagaatttataattaatcatgtgttttatatggctatgcgtagcctgaatttttatgaatatcgttccattttatctctactcaaatcagttctgcaatgtcactggtggcataggatcttttttatattagatgcacacaacaacttcatccaaatacaaaaaacgaatgggaactatatactagttgtttttttatttacagtctaaacaaagtaaaggaagtattacttgaataacttcttttctccaaacgatagctagccttggcctattctaaagaacattgtcatttttgcaaattaggaaactaatttatcatagctagccttcaattaaacgttttaacttaaactcagtttcagtatcctcaactggagtatagacgctgcatcttaaatcagtatccccatgcacttgtaatgaagtaagattaaacaacattttacctaccttagcatgacgaaactcaattaatacttcaggagcagagcttatctcattttcgttccaaattttacgaaactcaggatatgcctgttccatttcttgtataaattgctcataccagtcgtcagccacatactgtccataatacgttctaaatattgcgatatatcctctaacaaaatgctcccaattcactgctaaacttttaaattcctttcttgcgaataataagcgtattatattcctttctgccgggatgatttgttcaaaatccaaaaatacattagctgctgcttgattccatccaacaatctgacttcttctatctgatataatcgttgggcaataacgcagttcctgcaaaatttttactaaagccgggctgatttccttctcattctcatttctaaaaggttgtttcactccttcctctaatgctagagcatacaaatatctcctttcatcgttatttaattgtaatgctctagaaatagcatctaataccgaagtagatacttttatatctctaccttgttccaaccatgtataccatgtaagacttacaccagctaattgagccacttcttctcttcttaatcctggtgttcttctgcgggttcctacaggtaaaccaaccatttgaggagtaattttcgaacgttggttctttagaaattctgataaagcttgaagtcttgtttcaggtttcattaagatctccctttaaaatagtattaattatactaggataaacaacaacttgtaataggataacacaatagctaaagttaataaaaacaaggagggaattatcatgaaaagagttgtcattactggaatgggagttatttctccactaggaaatgatgtaaatagcttttggaatcaactagttaaaggacactcgggaatatctctaattgattcttttgatactgctttttataaaacaaagatagctggaatcgttcgtgatttcgatgcagatgaaatattggggagaaaagaagcaaaacgattagatcgttttagtcagtttgccttagcagcagccgaacaagcattagaacattcacaattacagttagataaggttgatcttgaacgtttaggggtatatgttggttcaggaatcggaggcatacaatcgcttgttgataatgtgaatgtattgaataaacgaggtcccgcgagagtaagccctagccttgtaccaatgatgatttcaaatgcagctgcggcccaaataagcataaaattaggagcacaaggaccatcattatcaccagtcacagcctgttcaatcgggaacacctctattggtgaagctttcaatgctatccgaaatgatgaagcagatattatatttgccggtggagcagaagctgcaatcacacagatttctttggctagttttggaaacgcccatgcactatctacaagaaaccaagatccaagtcgggccagccgtccgttcgatacagatagagatggctttgttatgagtgaaggcgcaggtatcttagtattagaatcattagaaaacgctattcttagagatgcgccgatattatgtgaagtagtggggtacggagctagttcagatgctcatcatatggtagcatcacacccagaaggtaagggtgcctacttggcaatgaaaaaggcattgagaagtgcaaatatatcaacaggtgaaattgatgttattagtgctcatgcaacaagtacacaggtaggtgatcgttcagaagttctagctattaagaaattgtttggtgaacattcccgcaaaattccaacaactgcaaacaaatccatgactggtcacatgcttggtgctgctggcggagtagaagcaattgctttagtggaaagtttgagacgaggaattattccgccaactattaatgtagagaagcaagatccagattgcaacttagatgttgtatcagaagcaagacaccttccattgaaatatgggctatcaaattcttttggttttggaggacataattcagcaatcttgttaaagcattacgattgaagacccatctttatagttcaaaggtgaaataatgaatctatcaagggtttatagcccttgattttcattatggaatacctcacagacaaatgatgacgggcctcagctatctggtatattaaatagaggaaagagaatacttaaaaaaacatttagaaagaaggtgatcccatgccaaataaaagtaaccccaatagattaatcaatgagaaatcaccatacttactccaacatgcccaaaaccccgtagactggtatccctggggaaaagaagccttcgaaaaagcaaaacgtgaaaacaagccggttcttgtcagcatcggctattcaacctgtcattggtgtcaagttcgtatagctacacattatttaaaaaaggacacatataaatatgcatccttacctttttattaacagcaagagttcgttgtactatcacttggtggtgttacacaacaagaggaggaatcttgtttttgattctcgctgttcgatttggtatagaaaaattcccattcattcctatttgggtcagtaatccaaaatttatcttggactgcataacaacaagttgtatccatttcttcacgtgcaaaaacccctctttttcaagcctttccttgtgtttcaaaacttcttccaaactatctacttggaatccaaaatgattcacttgatttcccgtcacctcgtctacgacatttaaagtgaagttcaatccaggagtctctaatagaaacttagcatagtctgtttttactttcacagcctttactccaaatactttttcataaaaatcgatcgatttctccaaactgacaacgttaacccctacatgaacatatttcattttaattccccctctaatatattaatcaaaaaaatttgatttaatgactaaaaattttttagcaacaatctccttcacctttttttctaaatacacaacaaagctcttctgataataaactatttacttcctcatcatttaaatcataatagctccatgttccctttgtctctttcgttattaagttggcatctaataaaattttaagatgataagaaagtttagattgtgttacctcaaaaatctcagtcagatcacaaacacaggtttttcccctttgacaaagttcatacatgatctctaatcgtttctgatcagcaagagccttaaatttttgttcatatttccgaagtagttctgatttcgtctcatccattcatatcgccttctttaatcaattttttttgattaattatgaaacccactaaaagctagtgtaaccagatagaggttttctatttttaatattttcctccatcgctactacaacaaggttacaacttgcttttggtggcaagtcatgaacacctaaaggagaggagatttaattaatctaaagcaaaaaatacaccaatatgatttggtatcttcatctaaatcgagtccctcaacatagtaaatcttcatctacaaaatactttcattacttaacatatatttaagttccttaatacgcaaaaaagttattgcggtctcaccgaaaatttaaattgcggtgccctattgcctttttctgcgaaagaaaacttgttaatatttacattactagtagagttaagggaagggtgaatatcttgatatcaatcacatcagctgaagtgggaatgaagattaatgaatggcataggcatattcaaaaattcaatgttacggatgctgaaatgttaaaggctgaaatagaacgtgatatagaggttatggaagaagatcaagacttgcttatttattatcaactaatggcctttcgacataaaatcatgctggagtatactctgccatctgatgaaaatcgaattgaactttcagaatatttaaagaaaatcgaagggcataagaagaagctagacaatatgcgagcgtattattataacttcttccgcgggatgtatgagtttagaaacggtgaatacacaaaggccattacatattacaaaaaagctgaacgcaaaattccaacgatctccgacaagattgaaaaagctgagttttattttaagttatccgaagtctattatcatatgaaaatgactcacatctcaatgcactacgctgaactttcatacaacatctataaaaaacatgaactttattctgttcggcgtattcagtgccattttgttattgctggcaactacgatgaccttgaaaatcatgaaaaagctctcccccaccttcaagaagctttaaaaggtgccgagctgcttaaaagtaaaaatactcacatctacgccacagcatttttcaatctcggtaactgctatcacaaaatggacaacttaaataaagctgcacgttatatcgagcaggccttggttcaatacagaaaaataaactctgacgtacttccgcaagcttatcacgacctagcgttgatttattttaaacaaggcaaaaaagaacaagcaatggattgcttccgcaaaggaatcagaagtgctgtagattttaaagacgaactttttatgaacttatttgaagcattagacgttctttatataagaaatggcgatacacctaaactcctcaacattttttctcgtttagagaacggcaaaggatacccttatctggaagagctggcattgttaggaggcaaccttttcgattataatggaaaaatagaggatagtatcatctgtttcaagaagatggtatatgctcaaaagcaaatatcgaaaggggaatgcatgtatgaaatctaaattgtttatcagtttatccgccgttttaattggacttgcctttttcggatctatgtctaatggcgaaatgaaggaagcatcccggaatgtaactctagcacctactcatgaattccttgtttgattcgataaacaacattagttctgattccctttagccgtttcataacggctttttcttattttagacatgaaaagcatttcacaaaagctggtcaaacccaaaaactagaactagatcaaaagacacagatcgaatgattcatttccaccctttgatccacataatacttagtttcatcattcttccatggtaatattttgttatataattaaatgagagggtatgaatatgaaagtctttgaagctaaaacacttatgtctgaagctacagaccgcgccaaagaatataaagaactaaggacgcaaatggtcaacttgagaaaagctttacaaagcgtcgctgaactggacgacagcgagttctcaggtaaaggcgctaataacattaaagcattctatcacgatcatgttggtgtcactgatcaatggatcgactacattgacatgaaaatcgcattctttaacagcattgccggagctgtcgaggacaagggcctctctgatgcttatattgaagagtcttttttagaacatgaactggctaacgcccataaaaaatcaaaatccatcatgtctgaacagaaaaaagccatgaaagatatcctaaacgatattgacgacatccttccgctcgacctattttcaacagaaaccttcaaggatgagcttgcagatgccaatgacaaacgcaaaaaaacaattgaaaaactaggtgatcttgacgaagatttactgacagaatatgctatgtcagaaccaaatgaacaattcatcaagtcagacttccaaaagctccaagaagcaacgggcaaaggcaaaaacgctactcccattcactacaacgccaaggcgtaccgtgagagtgatatacataagaaaaaaggcgatattgagaagcgaacggaagcttatttgacgattaagaaagaggaagcgaaggaacgcgagataaaagacttaaagaaaaagcttgcgaatggtgtctcagatccggatgagtatttagaaattgcgaagaagatcgggtatgagaaccttgaacctgcacagttacagtatgtggtgcagctagaacaagcaaaacagctgaagtccgtcggtgaaagtgtaatcaatgcgggtaaaacggcattggatatcatcgatggggttaatgatgggcttaacgatgcgattgatgatacgatatatggcatcaaggacttggttgtaggcgcatgggaattttcacagctccctatggaactaaaacttgcaaaaacaatcacaacagtcttaagtgtcccctcctaccctaaaataatttggacaaacatcgtcgattcatggaatgataaaatgataaatggcaatgcatatacaagagcacattatatcagttatgcggtcggtaatatcgttggtccaaaaggtgcaggtgctgcagtgcaaaccactactaagctctcaaaagtgggtaaagtggttgaaggtggaacagctactgctcatgtcaataaagggataaaccaaggcaaagcttacattaattctattgttagaaataagaatgatcttgcacttgtcgggattgcccaagacatcgataatacgtataatgcaaagaatacgcctttattaaaaaggattattgaagataaaaaagagagtgtacttagaaaatccgagacgtctaacaacatgggtataggtaatgtcaaacaaggtgatagtacccctctcgcacctggtggaggattagctgctcatgaggcaaaaggcgggcatcttatagaaagacatgttgggaagaccgacgaagaactaattcaaagacttgataagagcaaaatgagtaacaagaagatatccggttcatcatcatttaaagatagagcaactgcagaaagagttgctaatagtgctctcacaaataataaagcgaaaatagaaaaatggttaaatagtgatgtgaaaaagcctttagtactctcttataaagggaatgaagttttaggaagaggaataccaaagggagaagatacaattactgatttaactaatgctaaaattatattgaaaaagaacaaagatggtagctttatattaactggctacccaacgaggtgataccatgatagatacaaacatttccgaacctgtttttcaatttctaggaggtatttttcatcaagatatagaaactccagaatcagcactggacgaatacttagaagagattccaaaagaagagcaagaaactgatatagtagcattaaaagattttattaacagtgattatacggatgaagaaaagaatgattttatcgatgaagctgctgacggagtagacattcgtagttacggagtatctccattagtatggctcgaacaagttattcaaaaaatagaaaagaacattgaaactttataatccataaaaggtcccttgaaaattcaagggaccttttattacttcaaaagccctttaatttttgctttcgttttcggtccataaatgccatcaggatttagtccattcatcagctggaaccgtcttacggcatctgctgtttttgggccatacacaccgtcaattccattattcttagctcctttatccgggtagaagtatagtgcagccagtgctttttgaatttgccttacgtcgtctccttttctcatcgggcttgtcactttatagatgccggaaggcagcgcatatgacgttttcttgctgcttaattttgttgttttctttttagctgtacatgttttacttgtgcttgttttcccacctagcgcttttaattctttttcaatggcaaccttaacttgattccatcttccctctgacaaaatacggtgcgggcaatacttaccgttccagtcttggtgcttacggacacgatcaatgccccatccgcgttctttaagtagctgcgccacaaacttaatagcaagattttccgctgccttatatcgcgcccctcctgacttgctataacaaatttcgacaccaatcgacttacgattgcctgtaccgtttgttccatctcctgtgtgccaagcgttacgattcgttggaattccttgaatgacttgtttatcgtctactgcaaagtgaaaactcgttgagctagagttattcttcatgtaagaaatctcattggctgctgaagcatcattcgcagtgttatggatagtgatatactcagctttcattgggttaggacatttcaatccatattttgatttagaaactaaattctttacaactttgatggccatatatcctctctccttctgtctgtgtaataaaaaaagccactggcttagccagcagctctgtcagcgttattcttactctgttctttttcgttctccattgtttgtaatcgatctgttattgttgatgggattttaacaccgatctgtgctaagttttcagttattgacaatccttcattagcgacagcttcctgacgcacgtaggtaaaatatccctatgtgtgtcgtacacctctctgataacaagtgcagttcgtttttcttgaagcaatttcagtacaattttgagtgccacatgatagcttttggatgatccataaccacccacaagaaactgaaacttttgattccaatcaaagagaaattctttaaaatgtgggtttacttgtttaatcatttgtcatcactcttgtttacaatggtgatctcaaaaggtttatcttcttctgtaagttcttcagtctctaatttcttcttgtctatacttaaacgcatatgctctaatttaaggcgtcgttcgtcttccgagtgggctaattcatcaaactgtttaataaagttcctgagctctgccattgccctagattgagcgttcaagaacgttgcatgaggatcccaagaaaattggaattcatactcttcctcttcgccttcgttcacctcagataggatagtctttttctttttcagttccttaatcatttcctgcttatcagaaacgaacatgattttttgcgctcttataattgcggcatattgaatctgaatttggtcccatatcatatcaacaggggatcgctcctgtattccttccatgatcgatagcgtttcttctggcaggaacttagagaagaatccatgagtcacagcgttttgatttctcagtggagctgcaccacctttatttcctaatgcatttttatttccaagcggtgctcttcctcccttatttccttttgcatttttgttccctttaggtgcgcctcgacgcaaaagagcgctccctttcgatttaggagcgctcccttttattttttcttcccatttatcgtttgctttccattttcggacagtgctacttgttacgtttaattgctcagcaatgtcttttaacttcttactcccgccgctctcttcccacaaacgaaaagctttgtctctgcgtggatctcgtggtcttggcattacatcttacccacctccggatctcatgtttgagtttgtgtttgttttaatagtttttttctgatgtgtctactactgcacctttagacaaaatattcattttttcttatttagacttaaatctatgtcgaaaattattgtttgacatatcttatactaactccactaaaagaggtgataacatgtcaaatggttacaatagctccttcgtgttagttgtggtgttgttcatcctgttaatcattgtgggtgcttcattcctttattagtcttgaaatattttaatctactattaaaggaggtaactatatgggatactcgaatggttatggtagcactttcgcattaatcgtagtgctattcatcctgttaatcattgttggtgctacattcctttattagtctttaggcactttaatccaaagcggccttttggatttcacctccctgtacgaagacgccataagaagtttttatggcgttttgctatgttattaacaacacctttaaattgtcaaaataggatagacaataaaagagaggccactttaaaacctctctttttaattaattgttttcggaaatccttaacaacaaggttttccgcagtacttatgatgctcagtgacaggatcgtaacttgagtaactatgcggaaagtaatgaacatgctcataatgttgatgattcacgctagttgtatgctgcggatgaatgtgaggaacaattgtatttgagaacgtatgatgttcacaacacttagtcggatgcaaaattggaggtaaaattttgcaatgatgcatattttcttctcccttcattattttttatctgttataaactatgttcagaagcatctaatagtactattacaaccacctatttactgctccatgaggatttatcaaacaaaatcatgcacatcacaacaaaagctgtatagattacttattagagcaactctccactccacataaataccccatcgctctgccccacgtttctccaactctttatgatcaacgtggggttttattatgaaaagcgctcctcaatatgaatagaacccatttttcttggaaataatcctcctacgaacgaatgcacccgttattagtgaattcgctctaaaagcctcgtttgatagagcccattcaacccttatcatcatcaaacatgaggctttattttgtttttgtcgggaatattaatttttacgcaatactgctggtgttttatcacccgaattcactgtataaaacctcccagttgagttgatcctcgcttatcgctggggggttttctcattccatgaatgtagtggtgacgcaggaataattcgccgcgccgacctgcctcccattttacactacagattttttcggattcaacaagcgctcaaagtggcaatcttggcataattggctgatcaactcgtctttcattttgcgtacagtttcccttgaaatgccaagatgaagacctattgcacgataactcatcccctccatcatgcaatcataaataactttgtgctgctcccctttgatcttttctgcccccaactcaactgcatatactcgttcctcatagtacttaagacgtttgaaaagacgttcctctctcatatccatttgctgcaattctgcctgactcttcccgggacttccttttggcatagctgcttctaatccatattgtgcaacgccccaatttttcattgggattactgaaccatagagcactctctgcaatcgatgaacctcttttgccatccagtgatagctattgattagattttcaatatcttttcgattcatgattgtgttctccttttccaaataaaaaacggacaccaaacaaacagtgtaatactgtaagtttagtgtccgcaggctttccgtcttggacttaagtattgtttttttctattttaatctcgataggtttatcatataaatcttctttcttcttgatcatagttttactgcataaattgtggttactttcatttcctaataaaagatattctctatttatcgaatgtaatatataccatgtttcttttccatcttttatgtaaactttcgtagttttattaaaattaaatattggttttaaaagggctggaatatagcaagaaaaatatacagagataaaaaatgcaacaattttttgagtatttgtctcaaattgaaaagacaaaattaaaccattgagtccagtataaaaatacaaaaggattattaaatatattattgcaataaagatttttagaggtttacccttaatcttttctatgaagatgtaaagtaataaaaatatggacactaacattataccagctatacttatccaccttataatctcaagccaattaaagttgggattataacttgaaataagctgagctattgagacaaaaccgagcgtccagatcaaaacagaaatacaatatatccccaaccttataattaataattgttccttggagtaaaactttttttcaacaatacttgaagaaaacatagtgactggattccccgctcttataagttgtactattaaaaatccaactgcacttattgcaccaggaaaccctaaagaggctaataattgtttaaaagtatcttcgattttaatcaccactcttaaatttcatagttattccattttaccaatttacgctctccttctcaacgcctattattagacgtatcgggtagtaaaaagttgattaatcacctggttttaaattcaaggggataacaactgttggttaattttattatgctacacaaaaaaataattgatcaaatgctttttacctcaccttaaatcctatctcatgatcaactcttgcaaagctcccctttacagtttgaataacagtcttaccgtgctcaggagcatctaagacatgagcagttccctgattcccatctaaaacaatgatctgaacttttcctgggtcaattttctgctgaatagtgaagtcttttttgacgttaatttctcttggattgtacactcaaagcgccccctatgttatgatagaagtaccagttcatatcaagaacactgaggctaagcgcttcggtgttttttatttttaggcagaaacctcttttatcatgatttccaccctcggctcttcgctataaaacttactgactttcaaatccaccacctgattatcatctttgtatatcaactgattcaaagcactttcacaccctttacatagttatcaacatcaggctttgtagtaggccgcaaaagaccattttcagctttctctttctttttttttgagtttgaaactgacttaggcattggtctgtacactttgaaacaggaccagtaataattgtttctggtcgatgctgagacgcaaccaaagctacatactgcttaaaatactttgatttcgctggatttcgcatatgcaccttcccatttctcgtattgatccacgcggctgtccttgtgcgactggctcaccataaacagtgaacttaatgcaatacaactgttctttacctcccgtcaagctgttcccatagctcaatttctttttctattctcggtgcggagagtaaaattgccaacagagacacgactgctttaagcactcagcatccgctccatttgctttattttttcctcaagtaaacggattgttggtgtaagatctttaccttcagttggatttgaaggtccaaatatataaagtccaccaattactttcacattcgtttcctccttcattcccaatcaccttacctatgatttaattgcattcgatcgcctttaataatcactatgtaatcacgacacatctggtgaattcgtgaaccaagagcctcgtctatatccaaaatctcatcgactgttaactcagaagaaatcagcaaaggcttatgattcaaataacgataatttaagactgactggatttgttcaacctgccaatcggttgcccttggctgactgtttattggtttgaataagtcatcaatgaataggacttcgacctttctcatgacatcgagttttacaactaagttgtcaagttatgccagcaatacttatgataatcttctggaatcatggtacttgcaaggaaagaaaaaatgggctcttaaatccgtttaaatctaaacacaaaagaaccgcaactggcggttcttttagtatatattcctatttgacttcattattattggacagtaccataatcaaaatcaatatctttcttgtctaaatccccctcaaaatttttagcataagtcattgttaaatgtacgcttttatctatccaccaagttccatcatcagtattagtatcccaagtaacatctatatctcttcccaaattctcaaaaaacaccaaatttccaacagctactgtttttccgttgattttgtaatatattagaacaattttcttatcaaatatacctgtcccgtgctttacgattgttaaactataaggcttattaggacattgctcttcaagtataacttcaggatttaaaaataaaacataacaaatgaatagaattggtacaatcgttaacctttttaatacttttttattgatatttaacctcttcaacatagtcctccctttttaacaatccatttcatttgggatacaccctcatcattgaaggtatttcctatgaaaaatgattttgaagctcataggaacccttacatgacagggtttttgttgttttttcattgtctattaagatctaaatcaaaaaaagctataaaaaataaggaatgatacatattatacatgactaatatgtatcactcctttagtttttgttcaataatcgcccccgatagtgggataagaaatagcaaaagaacttgctatttctcaaatacatccaccaaatgttcaatgttagtttgtttttcatacatactaataataaaagtaaaaccttattaaaactttacaacacaaactgaatcgactatagtctaattagactaaaatattgatgtaaagaagggaaaaattagatgataaagtcttttttaatgttggggcagtcgaatatggccggccgtggatttttgaatgaagtagacccgatctataatgaaaaaataaaaatgttgcgcaatggacagtggcagatgatgacagagccgattaattacgaccgtccggtctccggcgttggcctggcggcatcttttgcagatgcttggtcgaaagctcatcctgatgaagaaattggcttgatcccttgtgccgaaggtggcagttcattgaatgactggcatccggaaggcatcctttttcagcatgctttgtccgaagcccgcttcgccctccggtccagtcaaatttgtggaatcctttggcaccaaggtgagagtgacagttatcgttcgctacatgaaacttattacgagaaattaactcttatcatcgagacactaagaaacgagttggaacttgatgaggtaccgttgattattggagggcttggtgactttcttggaaagaccggttttggacagcacgcgactgaatttcgacaggttaatgaacaattgctgcgttttgctaatgaacaacagaattgttattttgttactgcagcaggtttgactgcgaatcctgatggcattcatttagacgcagcttcacaacgcaaattcggttaccgctatttcgaggctttttcgaaaaagtaccatatcctgaaacccatttcgggagaggagcaatcgctgaaagtgaatggtgactattctaaaacagaacagatttaccttcatagtatggatttggcttcgggtaaaatcacgtacgcggaatttgaggcgcggatggcgaaggtgatgaaaccatgattcccttacttatccttggcttgctaatccaaaaccccggagctcacggctatgaacttttggccttaatggaaaaacgtcattacaaatacattgttaacttcacgaaaggttcattttattacaatctgcagcagcttgaagaaaagtgttttattgaacagattgagcagaaaccctcaaccagcgggcgtgaaatccgtaactacaaagtcacagattcgggaagggcagaattcgaaaaattaatgatcaaatacggcgccaaatcggaatatgtgaacctgcaattttatggggcgttactctttgcagatgaattcgacaaaaataaattactggatctgatccaatcacaaatcgatcagactaaaactcgaatcgagctccttgatgaatacctgtccatcactcaagaaattcccggcacaatcgattactttcgccgtatgaacgaaaattcccgttcacatcacttggttaatttagagtggtttgaaaaattgaaagcagaaatagaatcaactattgcagaataaaaaaatgcaaagttaaaaataagaatattagttacctacatataaaacctgtgtcgtagatatttagtaacatcttttatacaggttttatactccttctttaattaaacaagtaatagggttgtcagcacttgcccccaacaagagcaagtgaatcagctccgtgttcttcttttcaatcgctagccgttagtttaattagaattcaaataatccaagacgcggtgaactctttcgctgactgagcaatcgccttcaatttttaacactggacaagataaatctgccatccaatgatcatgcaaagctctacttctgacttccattccagcagtatcatataaagaagcccactctaaaaatgcttttgattgttcatatttactgccaccggctaacacttcatttccataacgctgaaattccctatgccttaatctctcaagccgtatatcttgtggaatccataagaagacgacaaggtcaaaataactttttagattatcgccccagccacacactgcaccagaaagaatccatttctcatttattgttaagtctttttcaagcaactttcgtctttcaggaatttctctttttttagtgaatttatctaaccaatagtaatcatcggtatcaagatgcgtatgaggcaaatgctttgataatgcagcacccaatgttgacgttccgaccccagaggctcccaatatgtgaatattttttttcatacttccccctccttattaagcaaccaaactccctgttgcataaggtacttactattattttgacataaatccctaaagacctttacttttctagagaaatccagatgcgtgttaaaatcatcatacttacgaaaacagtcattattaaacggattcatattccatctcctcagatgcattttcctatgaaaaaagtcttgatttccctataatatttaaacgaatccaatttttagattgtcgtctttaaggaggtttttcatcttgaggtatacaaacagtcatttagaggattggattgaaaacttatacagaaagattgatattacagagcctgaacaaattaattttgaacggattgccgaggctttagatattaggctgtcgtttaaacctgttacaagcttcgcacttaaacacagcggaatttataatatatgcttggacagccgtaaaagccgaactgaacaatggtatgattttgctcatgaattttgccatatatatagacatgaaggcgataaaaaaacaatgcctgcaacctggactgattatttagagtggcagtccaattattttacatatcacttttgcattccaactttcatgttgcgtaatattaatctttcgtacatacaatcccatgcaattgaaaatgtagcttggttatttaaggtgtccccttcattcgctaagaaacgtttaagcatttattacaggaagctgactcaacatttatttaatcaaacagttacgggaaatctgtgcaccccccttttgtaattaataatgaaatcctcatgcatttgcgcgcattgaaaaaaacaaaaaaagacgtctcccttcacgatccgatcgggcaggataaggaagggaatgaaataagcctgattgacgttttgaaatcagaaaacgaagacgtgatagatacgatccagctcaatatggagcttgaaaaagtgaaacaatacattgacattttagatgaccgtgagaaagaagtgattgtcgggcggtttggacttgatttgaagaaggaaaaaacgcagcgagagattgccaaagaactcggtatctcacgcagctatgtatcgcggattgaaaaacgggcgctgatgaagatgtttcatgagttttatcgggcagagaaggaaaagcggaagaaggcgaaggggaaataatgcagaagaagccggatctcatactccggctttctctatttcattaaagtttttttaaaaagaaaatagagaaaaaatatataaaagagtgatgaaaatcagttttgtcatcactgataaactcttcgagaaaagcgtctggatcatagcagatggcttctctcttatggggcgttacttccctccatcaagcgattctaagccggacgttctaaaagctctcctgagaaaatccttagatcggtatacttcagtacattcctagtcactgctttctttatagaggcctcatctatgctgtcgatacccttacatatatgactatcacaatgagaggacttttaatgaatatgaagaatcagttaaaaaacattggttagaagcagttcattttaaagaactactcattttatttcttcttcaattaaatcactggcgtttaagtacaattcttcacaatctcttctgttgactccaatccctaagtagtgctcctccagtacggtgacacatatagagggacgagaaaatctcatttaaactgcccatccgatggcgggcagtttaattattacctctcctgttcctttatcaccctctcaatcccatataaaatcagtttcaagccaaactcaaatgctctgtcagtccccatcaactcaaacagcccgttcgtaaacatcctccggaataatcccgcatctgtctcgctcatggaatcaagaaggcgtatcatctcctcccccggatgctcttcttggtccttcaggatagcagtgacattgcgctcatgctgataatcgtctaaaacgaagtagaagacatagtttacaagcgtagtaaccacttgcattttctgctcttgcttaagtggtgttgattccacgcagagtaacattcggttcgtgaatcggatgatgtccggttcatggggcagcgtcatcatcatgagctgcgtagagcaaggatatcggctgagcacgttccgtaccgttatcgcaagccccatcagctgctccttccagtctccctcggagtggaactcctccagaatcattttcgatacttggttagccagacgctggtaaagcttctgtttgctcttgaaataccagtacagagagggagcctgaatccctagcctgttggccaatcgtctcatgctgaatgtttcgatgcctccctccccaagaagttcccacgaggtttctaaaatcttttcctctgaaatctgaggctgctgctttttcatattatccgtccttttatctaacagtgtaagtttctctttacaggtttataaaatgatgataccatctaacactgtaagactcaaactaacagtgttagattaaatataaacaagaaagaagtgaaatataatggatacagaaaacctctattattttgaaaaagcaccgatcgcaaaagctgttgctcacttcgctataccgatgatgctaggtacatcaatgagtgtcatatattccattctaaatgcctttttccttggtacactccacaataccgccatattaaccgcactcgcattaaccttgccgttatttgcaatcattatggcgctaggcaacttgattggcatgggcagcggtacattcatctcccgtttgctcggggagaaaaaatatgatgatgtaaagcatgtatcctcatttgccttttacagcagtttagttcttggtcttattgtgatggcagtgggtctccctttaatcgatccaattgttcatggcctgggggcaacatctgactccttcggcttcacgaaggactatgtcatggttatgcttattggttcacctttcgtcgtattatttttcacgctggagaatatcgtgcgctcagagggttcagcaatcacgtcgatgaccggtatgattctcagtgttgttgtaaatattatgcttgatgcgttagtcatcttcgtatgccattggggtgtaatcggagttgcgtctgctaccgtcatttccaacttggctgcgagttcattctatgccttccacatgggatataagagccagttcttaactgtctccgtaaagtggttcaaggttggcctggatattctgagcaatgtattaaaaatcggcattccggtctttattatgagtatttttttgggggcaatgtctcttatctttaatcattttcttgtcgaatatggggacaaagccgttgctgcatacggaatttcatcccgcttatttcaatttcctgaatttattttgatgggactatgtgaaggggtcgtaccgttaattgcattctcttttacagcggataaattacgcatgaaaaataccattggatttacattaaaagcgattgtgacgctagcagtaatgtttggcgttatcgtctatttaatttccgaccatctaataggtttatttacaaatgacccgcaattaattaaaataggcagctacattctacatgttacgtttttatccatatttattacagggatgtcctcattatttactggtatcttccaagctaccgcgcaaggaacggccgcttttgttatgtcatttatacaaggaattactctgattcctgtattgttcatcgccaatcaggtgaacggctttcatggggtggtttggtcacttgtcattgcagatacagtcgcattccttgtaggtgccatcatgctttatgctttgaggaacaaattgcagcctgaattgaatagttaagtgctagtaaacatatgacatttaaatccgtattgtaaactaatcaaatatgtaaaaaaagatagtttagccctcataatcggctaaactatccccttctcaaatcctcccactttattattaatgtggtttagaagaattgaacctgcacgagttattccgctcactatcattgattatgaagcttatatattaaaaaatggtgagctcaaaacagtaaacgtcgggcttttttactctcttccttttaaatacacgattagaatcatcaaaaacaataatgatatttacacaaattgcgatttacgcaaaagtcaccactcctcttttcatggacagaaaaagaggagcaaacctatgtctgcgtcttaacgtttttctttgcacaacgtctagtatcttctttggatcaatttttctgtaagaaattcaacaagtgttactcaacgacatgaagaaattgtttatgtccttgtcatttcagttattcaactattggtgtaagtgaactaccagcccatacctctcccttattaagggtccagctgtcattataaaaattagacccacctttattaaccgaagggctgtgaacctcatcccaagttagaaagtacacggttttcggatatttttgtttgactgtattaagaaacacagcataatccaaattaccatcttgtttttgtgtgccgatttctgtgaacgcaaatggcttattaagagctgttaactcatcatatccttgaattgtaaaatcatctgagaaatacgcatctaatccaacaatatcaacatatgaagatccaggataaaagtcagtcttaaagtctcgattggcgtccggtgagtaaacccatatcaggttgtccaaacctcttgtatcagtcatataatgatagattttttgataaagttgtttataaagtgagaagcgctggctgtcttttttgttatattcggttagtccccaccaaaaccattctccattcatttcatgaagaggtctgaatagaacaggtacaccttcattttttaactgatcaaggccatctgcaactttgctcagaacagcctctaatcgcttaccctctgtagttgatgagtctaagattttttcatactcactgtttgaaatatgggaagcatttttcccaaaagtactggatgcaggattagctagatgtaagctaatctgtggtattccaccacttttccaatatgagattaagtcactgttgcaactatagtcgatcgtctcagtaatatcagaaatatagggcttctccaaccatccactggaatagtcacaaccataaattgcgggtaactggcctgtagcattcttaattcggttggcttctttcatggaaaacgaagcatttgtgaatccgccgaatgtacctgacagtatgcgattttcagatcggtttggcagatgagccagccaattcatcaactctttcgttgttgcctgtgcattaggattcacagggtaaactgtatgagcaagagccgactgtgaaaaagatgaaaggattatgaaagatagtaatataaaaacagcaatttttttatacataatattctccgtcttctactttttattattttaatcatttattctgttaaagatttataaagcacagaatctattaagtcatttacgctttttcatcccctttcatatttaaaataagagagaccttccttagagatatttgcatttacccattgtaaatctccattttttgggcattaattatattaaaccgaaaaatatcttctttcatcagacgtttcacctattttttactgtatgcctcacagactataaagcaaactttcccttttgcatttaaaccttattacctatttcattaagtcgaattattttcgatattaagtggtgaatgattttcactctcttttttatcctattaaattattttaaaaaataatcaaaaaacaaatcattttgatccctattcatagcagcaaacgttacttttggtacaaagtcctttataaacagaaagaggagcaaacgtatggtttactcctctaacttagtttctttcttcttggtttttcataatctgatgttttccttaacagcagttccaacccgtcactttctccgcagcatataatcaagattctaataccaatccaaaagttattttgatctactgagaattttaatttgcggtgccctattgcctttttctctctctgactcatagttttaaaccattcaataaaaaaccctcaattgatgtttcatattcatttgattttcaaaaacttcagccgtatcaacctgttaatcttacccgctgacttatatcaaaggagctctaaccaaattttaatggctgtcgaacttattaatagcgctaaaatccattgcaggaattttgtatttactttttgcccaactgatgcgccaataggagaagcaattaaactagcaatcataagaaccagggctggtacaaaaagaacctggcccgtaattacttttccaactgttgcgccaatagatgaaagaaatgtaatcgcaagagatgaagcgactgtgattctaacaggaatatttaaaatcgataacataatggggactaggataaaggcgccgccagctcctaaaatacctgatacgccaccaatgataaacgctagggacgaagccaaccatttattaaatatcacttcttcgccttctctatgggcttgtcctcttttaggtataaacattaaaataactgctataatagccagaattccgtatataaagttaattcctttttcagatatataatgagaaaagtaactccccaatacactccctaaaaggatgctgcttcccatgtaaattattaatgctttatttagaagaccactcttacgataagcccaaacaccgccaagtgtcgcaaagaaaacttgaatagcccctatccctgaaacttcatgggcagttaatgacatcactctcactaaagagggaatatacaacagcattggataattaataactgctccgccaataccaatcattccggaaataaaggcaccaataaaccctataatgaaaagagttgtgataaaggcaatatccactttggtttcctcctatcaaaggaaaagggtatctttctattcgataccctttcacattcattagcctttttgaatccaaaatttcaatacatcgccctcgtccgtttgctctaaaaggtcatgtccgcctgatttagaccaggctgcaagatcatttttagctcccttatctgttgcatgcacttctaatatttgacctgattccagttcattcatcgctttttttgtcctgacgattggcattgggcatgccaggccttttgcgtctaatactttatctgatttcatgttcatctctcctcttattaatagaaacttgtgttaccgtattgcacagcggtttgggccaatctccatttcacgctgtttttcttcatctgggctgattttccccatgtttgtttctcgaatctcttggtatgcatttggttgcggaggcaaatgatctgttactaggtgtctaaattctgtttcatccgcaatgttcaaaccatggttctcgctaaataatgtacttagttttttaccaacacttccatcctcatttagctcgtcaatgatcataaagtgtgccggtaatacaattaaatcctttgataacgctttgtaacggctataaagcgtttttcttaaatctcctacccaatcttctgccataccggctaagtctggtctgccgattgaatcaataaacaaaatatcacctgaaagaagatacagatcatcgacaatgaaagaagtggacccaatcgtgtgtcccggagaataaatcggttgaattttaatcgttgtatttccaatgatcatgtcgtttccttcttccaacggctgataatcgaataccacttcttcagcatctttaggcggtaaccagtaggttgcttttgttttttcagcaatgactctgccgcctgaaatatggtccgcgtgaagatgtgtatcaaatacgtgagtaatcgttgcacccttctccttcgcaaaatccataaagaaatctaccatacgtgtcgcatcaataattgctgcttcaccattggaaatgaccatgtatgacaggcagcctttaccgattcgaacaaactgatacatctcaccgccatcttttaaatccccgacttttaccggctctaaatgttcgctccatgctttcattccacccttaagataggatacagaatgacctgcttcagatagcatttcggataccatgacggatgaaccttcttttgcacaaacgaccagcacttctttatcagaaggaattttctccaatatatcttctacgccatctaaaagatcaaaataaggaacattcaaatggtcaaagtcatgcccttctatcttccaatcattaaaatcattttcattacgcacatccaaaataaataaaggttctttgttatagattttttttgtcacttcttttggggtcattgcctttacggtcatgtttcaatacctcctatatcaaatcttttagcggaactaaaacgttaaggatacatcagcatctttaacaaaattctaaaaaggtaacagccccgcctacttcgattccttgtataaattcatcttttgttaaacccataacgtccatcgttatttgacaaccaattcatgcaactcccatttcaatcagttaagaatagaaggcacatttgcgttcctacaaccttctgcgacatgctcttttccttgtcgcaatattacagactttataagcatcaaacagaccgccatttgccgcaataatcgctactcttgtactcatctgttcatcatgctttttatttattcggttttacctgtccactcccgcataccggggacaacattaataacttttttaaaaccttgttttttcatggtgtgggccgccatttcacttcttcttcccgaatggcagataatataaatttcatcatttttgtttaattcattagagcgcttttccacttcaccaagagggatatgcacaactccaggaatatgagctttttcatactcctctatctctcgtacatctaaaatgttaagagactcgtcactatccactttctgtttgaaagcttctaatgaaatatcaggaattgaagatgcattttctgatgaatgctctcctccttttcgaagaaaatgacgaagtatttctccctctgcttcagtacctagatattcatggcctgtactttttgcccatgcttccagatctgctgtggaacctttatctgttgcttgaatttccaatacttcaccagcttttaaatccttcattctcttcttcgtttttacgataggcattggacacgccaaacctttagcgtctagtacaatagttgctttcatcattttttcctccttttttcatataggggtgggggtatataaatatacaaaaagtttctcactagaagttaataccatgtattcatgcccccttttatatttgtgatgtttttaaatccttgtttcttcaatatttttacttgcctttaaacttctcattccgcttagcaatgagtaaatgagtagcattagataaataagttgacactgccttcctcagcatctgccaaataagctgctacaccagcatagtcgatatcatctaatagttctttttcctgtaaaccaagaagatccattgtcatcgtacaagctacgagctttaccccctgttcttgagccatctcaatcaactgaggtaatgtaagtgcattatgctttttcatcacatttttaatcattttagggcccatacctgcaaagttcattttagataaacccatcttatcagcaccacgaggcatcatctttccaaacattttttcaagaaatccttttttcactggaatcagctcttctttacgtaaagcgtttaatccccaaaaagtatggaagatcgtcacttcatgatcgtaggcagctgcaccatttgcaataatataggctgccattgccttatcataatccccgctaaataaaacaattgttgtgcgttttgtttgttctgtcatgtttattcccccaactaattacccctgtgggtatattaaagtcaaaaaaattttttcgaaagatctgcttttattcaactctttaaataccatagggggtataatataacgcatataaaaattcgtcaaccttaggttgatgaatttttatcggctctttaccaataagtcaactgcttcttttactaaattttgtgtgtcttcgcctttttctaaactttcacgaacacaatgttcaaggtttgtgctcacaattaaacccatcgctcgatcgatcgcattacgggaagctgctaattgggtcacaacctctctacaatcttttccttgttccatcatagtcaatacacctttaatttgtccttcaatccgtcgtaagcggtttttaatcttttgatcatactccatatatcaatgaaatcctttctttcatttatttttacatttacatgctgccagttcataactgtttacatggatacctttgcgctttagaaaacgcactcctaaatttaattccacccgatcacgagctattatgtgtattttatcacgtggaatctctaaataaaaacgttttagatacgcatatgggatgtttaaaataatattatccgaaaaattggctacatcgttataatgacgaatatctaatattgtgatgtccatagcctctaatttatctttatggatacaagagattccggttataggataataccgtctatacgatgcaatgataatcacaaaaataagcaggaatgcaataactaaataattgatactacttacaccaccttattaactctttgttattcacaaaactataatatacccccataggtatatagtcaagtgtgaaagttactttctttgagctgatagattcatttcaatatccgcggattgaaaaaatacttacatttcgataatgccaattctgctaaaagtaactcgaataaagaaataagccgattttattttaaatcgactttattttatcaattacttttaaaattagcacaagactgcttggatattacattgggtttcatttgcataaaaacaattcttaggtactggttccccatgtttcatgctggatgtgactccaattactcagaaatctgcgaataactatgctaatcttccgcagccactgcatctgctttggttttatgaactgtaccaaatggatggttaggaggagcataaatggagtaaagttttaatggcgtattacctgtattaatcacgttatgccaagtgccggcaggtacaacaatggcagaatcatcataaacatttctttgaaagttcaaatgatctttgctctttcccattttgacaaccccacgcccctgctcaatccgtaagaactggtcaacgttaggatggatttccaacccaatgtcttctccaataccaagactcatcaaagtaacttgaaaatgctttcctgtccataaagcagtacggaacgtattgttttgttttgtggctctattgatatttacaacaaatggttttggtccataatcctttaaaagaagatttctatcttcatatgaagagcgcaaatcggcacctctgtgtacgttctccatctcatttggaatagtccaataaacagatcttccatcattatacatcggtacagtcacataataataacattgaggcgaaaaagggttatagtacattttttgatccccacaattataaatttttgtgatagtatcctatgcatttattaagggagtgtgctaaatcaagaaaaatcatattaaacacaaaaatgaatgttcgatcaccgtttgattcacggatgaataatttatcaccgaccttgtaatcgttttctggatgttgaatttcactagcctttgttaacaagacatcgaatgacacttttatatcatggattatcaaaggtcgacgatcctaaatggcttttgaacatttacatagcacaacaacagagtatacggaattctgttgtttgtcccccctatcccagctcttttagatttatccctttggatgcgccttgatggccagcttttcagcagcgtagtatttagcgcctcctgaatcgttatagcatatttcaacgccgataaacttgcggttcccagtgccgtttgtaccgtcacctgtatgtgggctcgtttttagtaaaccagtttatattctttttgggcacacaatagaagcaatttttcatatgaaaatttcgtaatcttacacctctttaacttgaaggaggatttttgcatatgtattttcatacccgtcaactaccatctcatccagcatatattcctcatatgcattttcccctatttgcattccattcttttcaatgaactcaatgattctccggtacgcctcttcagtatttccgcctatttcatatccaactgcatacaggccttttggccgtacatgataatttatgttctctcccccattttttacttttatataaaagtaactgtaattgtagaagtctttttctaagatttgttcccgtgcaaagattccgcctatcggatatccttcatctaattcatattgctgaacttcatgaatgagttctgaaatggctgccacatattttcgttccggtaagtttaatgtttttcggcttaacatgaatgtttcttcatttaaatattcaaaagaaattgaggaaaaatcagtctcaagtgcttgttctgtaagcgtcacttttgtttgtaagatcgtttgcaactgcttaagctcatttatttttttatcaatctcaatagacttttcttttagaacatgcaggatcttgtctggtgtttttccttttattagacactttatttcttttaatggaaccccaagctctttaaatagactgatgacttgaaaaatctcaaattgatgataggaataatatctatacccattttctttttttatttccggcgagaaaagaccaatctcatcataatgaaataaggtttgtttttttacacggcagagcttcgaaaactcccctgttgtgaaatacttcttaacatcttcgctcataaaaacctccttgactatacggtaaccatataccttatgatttgattgtacttgaaaaaagcttcaagcgaaaaggataggtaaaaagggttcaattgagtaaaaggggaattcagatgaaaaaatcaataaatgagcaaaaaacgatattcattatactattaagcaacatcttcgtagcatttcttggtatcggtttaatcattccagtaatgccttcttttatgaaaatcatgcatttatccggcagcacaatgggttatcttgttgcggcttttgccatttctcagttaattacttcaccttttgcaggtaggtgggttgaccgtttcgggagaaaaaaaatgattattctcgggttgcttatattcagtttatctgagttgattttcggattagggacccatgtttcaatattttatttctcgaggatattgggtggtgtaagtgcggcttttatcatgcccgcggtaacagcatatgtagctgatattacaaccctaaaggaaaggtcaaaggctatggggtatgtttctgctgcaattagcacaggctttattattgggcctggtgcgggaggatttattgccggctttggcatccgcatgccgtttttcttcgcctccgccatcgcgttaatagcagctgtcacttctgtttttatactaaaagagtcattgtcgatagaagaacgccatcaactctcatctcatacaaaggaatcaaatttcattaaagacttgaagagatccattcatcctgtctatttcattgcatttattatcgtctttgtaatggcttttggtttatcagcttatgaaacggtattcagcttgttttctgatcataaatttggcttcacaccaaaagatattgcagccattattacgattagctccattgttgcggtagttattcaagttttacttttcgggaaattggtcaacaaacttggagagaaaagaatgattcagctgtgcttaataaccggtgcgatcttggctttcgtgtctactgttatgtcaggatttttaactgttttgcttgtaacttgttttatttttctggcgttcgatttgctacgtccggccttaaccgctcatttatccaatatggccggtaaccagcagggtttcgtagcaggcatgaactccacatacaccagcctgggaaatatatttggacctgctctaggcggtatactatttgatcttaacattcattatcctttcctttttgcaggtttcgttatgattgtcggccttggtcttacaatggtttggaaagaaaaaaagaatgatgctgcagctttgaattaattcattttctataaagtcaagtcatttggatgcagggaatgcccctggttaggcacaataagaaaaggtacttaatttgataggctacatgttgcttgacgtgaatatagtttaagctgagttttagcaatatcaggataccgggataagaaaaaaggagaatgtagtatgagtataaaaataaaaggagtaactgatgataatcgtgctgcaattcttgatctacatgtcagccagaatcaattatcatatattgaatctacaaaaatatgtttagaggatgcaaacgaatgtcactattataaacctgtcgggctttactatgaaggagatctagtcggttttgcaatgtatggattgtttcccgagtatgatgaagataataaaaacggacgagtctggcttgaccgattttttattgacgaacgctatcagggaaaaggattagggaagaaaatgcttaaagccctcattcagcaccttgctgagctatataaatgcaaaagaatttatttaagtatatttgaaaataatattcatgctatacgcctttatcaaaggtttggttttcaatttaatggtgaactcgactttaatggtgagaaggtaatggtaaaagagctatagatatccaggcctccttttttgctgagaaacgtttgaacttcgataatgattacctacttaaactgcaagatcattgtttaaaaaagcctggatgaaaatttcatctcaggctttaagcatcttattagtcaaaatctcatgtgttttatccagatgttattcttttttccggacaatttctaaataattaatatgccggccaactgttttgtgcactttaaaaatatacccatcggcttctataacggacccaactgcagcgtctatttgttgagtcataaaccagccgcctattgtatccacttcgtcacttgctaacgtcgttcccaataaatcatttacatcttcaatgagcactttcgaatctaagatatagtgattatcatttacttttctaatattaggcacttcatctttatcaaattcatctctgatttccccgacaatttcttcaagaatatcttcagcagtgactaaacctgaagtgccgccatattcatccacaagaatagcgatatgtgttcgctctttttgcatttttaccaataaatcatgaattggaacggattcaataacatggataacagggttgatatgattttctaacttgaaatcctcttttatcttctggtctgtgtcaatataagctgacaaaaattctttagcattgataaaaccaatgattgaatctttatctccatttaggactgggtaccttgtatagctctctgtcttaatggtcttaacaatagtttcataagaatcctcactagaaatcgctacgatctctcttctcggaatcataatttctttggcgattctttcatcaaattcaaaaatattatttacatatttcaactcattttgattgatttcaccgctcttatagctttcagacagtaagatgcgcagttcttcttcagaatgagcaagttcatgttctgatgcaggtttcaaaccgaagagtcctactataaaccgggctgaaccatttaaaaaccatataaaagggaacaggatgcggtaaaaccaaataattggctttgcagtcaaaagagtgatggtttccgctttttggatagcgagtgttttaggagcaagttctccaactacaacgtgcaaaaaagtcgccatcacaaaagcaatcactaagatcaatacatgtgagactgtttcacttacatgaaaatgagcaaataaggggtgcaaaatcacttcaaaagtcgattctccaacccagccaattcccaacgctgtaaccgtgatccctaattgacaagctgacaaatattcgtccaaatgagtaatgacctttttggctgatacggcacctttttttccctctaatatgagttggtcaatttttgatgacctgatctttactatcgcaaattcagtcgcaacaaaaaatgctgttaagacaattaaaatagtaaagattataaggttaatggttgtcaatgatttgccttacctagtaaggcgtacacctccgatataaatatttatttttataacccgttttttctgaataaacaaaaaacagtatatataacattataagttcaaaagaacctaaaatcaactctgaatgatgtaaataatcatctttttccgtatggagagtggttcccgtagtattcaactagcgattggtgacgttttaaggcttaaaatagaaagcaaaataaaaacacacctgaattttctggtgtgttttaataatatccaaccgtcttgatttatttaatgtctttattaaggttttcttttaaaatttgaatcaattccgcctgttgctttatatttttgcggccatttctattaattgcagcaagttcacagacaattccagctgaaatgaaaaacaataaaccttcaaacattttaaatcccccaccatctaagtgatagtcaaatttgttttttctttttgtaatacctgcttataatcttccttacgctgatatatgttatttaaaatgagtccaataatgacaaacagtgttcctactatatcaaatgcagttatgttatatcctttgatcaccatgattaacaatgtagtaatggggacaaagttaataaataaaatcccattaatggatgataggattttaatgccatagttccaactaaggagggctatgatacctggtaaagtaatcataaataaaaaatcatacttaattgctgcaatcactttaatactcggtaccgacacgtaaccttgcgcggtaagtatagctgtcatgattcctgttatagctgtgccgaataaacatgtcaatgttgaataacgaagtgtggaccactctcggaatatctgtccccccattgtgtagacaacccaccctaaaacaccaatgaatataaagagtagcgagaatagatgatcccccaataaaaaaaagaaacttatattacctttggttatgaccatcgaagcccccaaaaaggcaatcaatatactgatcattgtgtattttttaggtttcacatgtttatatccccatagaataacaattgaaagcattggcatgagtgcctcggcaatggatgctgtcataattccagacttccccatcaacctttgacctaaaaaaataagaacattgtatacagtaaacgccataaccccaaataaaatgatccattttgctttaccctctaaatgaaatgatttttttccttctcttaccaataataaaatcactaacataatcgttaccacaccgtagcgaataaatgaaaaataaaacggatcaataacttctaatgcatgatctgcaactggaaacatcgcgccccaagacatacttgctactaaacatgtaagggcaccaatgaataattgactttttttcattgaattcccctccttttctttaaaattacaatgagaattataaaaagaagtaagcatcaagtaaaatgaacaaaagtgatgaaaaacatcattgataatgatactttaatgaagggggatcttcatggaactgcgagacttacaaattttcaaatgcgtagcccatcacaagagtattaccggtgctgcaaaagagttaaattatgtacaatctaatgtaactgcgcggattaagcaattagagaatgaactcaaaacacctcttttcaatcgtcataaaaaaggggtttcactaagcccagagggccgaaaaatgattgaatacgttaacaaaattttgaaagatgttgaagaactggagcaagtctttctagatactgatataccttctggaatattaaaaatcggtacagtggaaacagtgaggatactgccgaccattatagcttcctattataaaaagtatcctaatgtggatttatcattgcaggctggtctaacagaggaacttattaaaaaggtcatgaatcacgaattagacggagcttttatttcaggccctttgaaacattctatcctggaacagtatgatgtttatactgaaaaacttactcttgtaaccagtaacaaaacgtttaatatagaggatttttcaacgactccgattcttgtttttaatcaggggtgcgggtatcggtctaggcttgaacagtggctcaaagatgaaggtgtgctcccaaacagaatgatggaatttaacatcctggagacaatcttaaatagtgttgcacttggactcggtataacagtggtaccggaatctgctattatgcatcttgctgcacaaggtaaggtttattgtcacccattacctgagaaagacagctgtatctcaacaatctttatacgccataaagatgcgtacctgacaaattcaatgcgcagcctccttaagaccattgttgaacataaaaatatgagtatgtcttaaagtgctttttctctttctatgttaacttcttaaataaaagagaaagcgcatctccacttcgctacccttattcacgcaaaaaatagagcagtaaacatgtgagttactgctctgcttcgtttatccaccgttcatttgttttacaatgtattcagcatcatttcctacaccttgaagcaacgctgaacctcgcttatgctgccaaggcaaccctataaagtacaatccttctacaggtgaaacacctctatgatgtatgattcgaccttctttatccaaaacaccttttatatttatccaacataagggattcctgaaaccagtagcccaaataatattgtttacttctaatgtagatgaatctttaaaaatgatttcattttgctttgcggcaatgactcttttttttaagatgatctccttctgttttattgcatgttttaattcatgcccaaatactggatcacctttcttttgaatgaatttgcctactattgatgtatgacttgcatgtaaaactcctagtttatcaaaccaccaaaagatgcttctttttcctatcattaaagggaaataaacaagtttattactacaagctaaatatgtaactctttctttggataattcaacagctatttgagcaccactattcccaccaccaactactagtacatttccatatgccaattgttttgaattcttatattgtgatgagtgtagttgattaatattatcggataaatcctttgatattgatggaatattaggggtatgaaaaggccctgtagcaatgacaagattcttcgtttgatattcttcccgatttgtttttattaagaaataattctttatttttaggacacttattacttctgtccgtaattggattggaatttcaaattttttaacatacttctttagataagcaacaatttcattttttgaaggaaatccatgtttttctccttcaagatgcattccaggcaaagagctatacattcgagaagtaaataaaactaatgagtcataccgatctttccagctctcccccaccccatgacttttatccaaaataataaacttttgatcggactgctttagataataccctatcgagatccctgcttgaccagccccgattactatagtgtcgtacacattatcaccccgccaatttcaaattgtcagtagacagaatttgcaaaatgctagttgatctcctcactataaagttagataaaaaatttaatggtgatggtggttacgcggcttctccattttaggctgacaaaggatcgcattgtcgtgattatgcgcttcggtttccatttgaatggttacgtgcgtaatgcctttatgctcaagttcatgttcaattttgcgtaaaatattttcactttctgaaatggtcagttgatcgtccacaactgcatggcaagaaagagcattcaatccgcttgtgatagaccatatgtgtaaatcatgaatgttttgaattccctctgtcccttcaattgtacgaatgatatcagagacatcgatattttctggagttccttccattaagatgtgaatggaatctttagtcacattgtaaccgcttcttagaacaagaatagccacaatgatactagccaatggatctgcccagccccatccaaagaagatgataagtatggcagctaaaatggcacctacagagccgagcatatcgcttattacatgtaaataagctcctcttatattcagattattctttgtatctccgccactcatcataatccaagcgaccaatagattcacaactaacccgatgatactaattgtaagcatgccggttgctgctacttttggtggattagagaagcgttcgattgcttcataaatgatataaagagaaataagaattaaggcagcaccgtttatcacagctgcaagaatctcaaatcgtttatagccgaatgtcttattgtgatttgcctttttttcagctaatgtaaaagcaatcagggcaaccattaatgaaattgaatcactcagcatatggcctgcatcagataaaagcgccagactatttgttaaaaatccacctatagcttctattatcatataacctgtaatcatgataaaagagatcaataaaacctttttatttgctccttcattatgattgtgacccataaaaaactcctccttaactaaagtttttaatacatatgtatttattatttcaaatctgttatgaagcattctaacatgatgcaaataatatttatatatgagcatgtgttcatatataaatatatctgctctttactgaaatgtcaaaatattttttatagaaatcaacaatacctccttaattattctcttattaacataaaaaagcggaacaaacacatggtttgctccgctaacctagtttctctatccttttcttgtagtatgcaactacaatttacctgttaaaaattaggcctcaccaagtccaaaactccagtcagcattatcattttcaacaatagatacaattaaatcagttgatgcgataccacactcagattccagtctttcggctaacagcctgtagaatttttgtttcttctcttccggtcgggatttacttgtaacagaaagaacaacaagatttttggttcggttaaatcctaagcctgtatcctcaataatcatatgattttctggatgttcatgcacaatttgataacggtcctgttgaggcacatcaaaagcctctactacaacattgtgagcgacatctaaaagttttttcaaacttgattgatctcgcccttctattaagtcaaaacgaagtaatgacataaaatcccctctttctactgtcagatatttctaatcatctgctacataatgtgctcatttttattcttactacattagaataaaataatttcccaataaccccttcattctgttgttagtcaagcctatgttatgatgtgtatttccataggcaatatacagaatcaacttcgagtaattaaccattttttgaaatagccttatcacttactctagaaatcatttattcttctaagctttagtttacatgaagctctgctatcatatataattcaaaattaagatggaagacatctcaaaatcagatatcaattatggaggactgcatgaatattcagttgttacaggtttttctcactactgctcgtgaaggcagtatttccaaggctgctcagactttaaattatgcacaatcgaatgtaacgaataagatacaacaactagaaaacgatttacagacaaaattattctatcgccatagtcgaggaatcacacttactcccccagggcaaattcttgtttcttactcagagaaaattctacatactattgaagaagctagagcagccatgggcgaatcatccgcgccttctgggccactgcgtataggatcaatggaaacaacagctgcagtttggcttcctcaactccttgcacattataataacctctatccaaatgttgatttgaacctagtaaccggtcctacggaacaacaaatacaagcagttttacattatgagttaaacggcgcttttatttcagggcctattgaacaccctgatttagttcaagaaaaggtattggatgaagagatggttcttgttacaagtgcttcacaccctgtgatttcttccattcaggatgttcaaacacaaacaatgcttgtattccgtaaaggatgctcttacagagcaaagctcaatcatatcctccaagaagaaggtttattacctataaaattaatggaatttggcatacttgaagcgatcattggctgtgtaagcgccggcttggggatttcactgctgcctctttcaatcattgcttcgcatgaaaaagaaggccgcatccgcagccacactatctctgacaaatattctttcgtatcaactatgtttataaggcggaaagacactttaattacccctgctttatctgcttttttaacgcatatgagggatcattttcagataaagaggccagatcaatcgtaaataaatggatggaaggcatgcttcgcctcaaaatacccctgatcagttgtctgatataaaaatataggcgcatctcaatgtttgtatagagcaaaaaagcaaacttcggtatgtagtttgctttttcttcgtgattttgcactcagaatcgtgaaacctagtcgatattaggatgtagattttcctcattcaaagaattttgaacgaaggtcattgccctagacacttggttgcgtcttgaagttaaaggctgactatttcctaaagcgtcaatcgctctcacaactattaaatattcacctacagatttcgggtgacaacgggaagattgatattttcggttggacaggggcagaacatccaattgtaacagttgaagtatccactgatggaggagatcctgcagatctgagtgatattgctgttaattgatcaacttgtttttgttcggaatatactcagtatatagccgcatattcctcctgcaatagctggaatgagccaccccagccctatgttatacatagggagaatctgagagaaaatatgattcacaacttcaatttttattcccgcctccttcaaaccgtcaaataagctgatgatgaatgcgaataataaactgccttgatacacttctgtcttccctttaaatacagaatgcaaaaacgttaaaaatattaaggaaatcgcgataggatacattgtcagtaagacaggcattgacaccttaatgagctgggttaatcctatatttgcgacaagcgtactaaacactgataaaacgacagcaatttttttataagaaatgttcggaaatagttcatgaaaaaatgaagaacacgcagtgatcagtccgacacttgtcgtcagacacgccactgtaatcattaagcccaataagattgaaccataagaaccaaaataataggatgaaaccttagccaaaacctctgctccattttctaaaatccccagttcttcaacgctggaagcccccatataggaaagggctgtatacataactgctaagagtacagctgcaatcgcggctgcttttgcacaaacacccatcagctgttttttggtagaagctccttgttctttcaatgcattcacgatgataattccaaaaacaaatgctacaagggcatccagagtgaggtatccttcctgaaatcctttaaaaaacgcttgtgatgtgtacccttttgatggtgcttgaatggttccaattgggcgaataagagctaccactacaagcaatccgataaatgtcagcttaattggcgtcaaaaatttcccaactatatcaatgatttttgaaggattgagtgataacaagcatgccaatgcgaaaaataatattgtaaataagattaatgagacagggcctgcatcatttgataaaaaaggttttaccccaatttcaaacgatacgtttcctgatcttgggatagcgaaaaaaggcccgattgccaaatagagaatcgtcgtaaatacaatgccaaacaccgggtgaacacggctggctaacgactgtaagttttgtttacccgaaaaaacaaatgctgttatagccagtaacggcaatccaactccggtcactaagaaacctgcattagcgacccatacatttttcccagccatttgaccaagcataggcggaaaaatgaggtttcctgctccaaaaaacaatgcaaatagcattaatcctataatgatgatataggaagcagacactttttttgacattatatatcctccgattaaagtagacacttcttgaatagccaggaaacattacagatgctatttgcactggcgcagtgttgattccaaaataagtttgtgtcagttttatatatttttatcaagttcaacaaaagcatgatcattttgatcgtttccgatatcggttaaaaaaccaattgcaccaaaaccatataaacaacggttccccccgctatggaaagaagcatatttttcttccacaagtgaagcagtacaactgcagctgctccaaccaattcaggaatgccatgactttcagaaagcagactcacatcttttaaacaataaatgaccaaaagcccgattaccgctgatggcagcactttaccaagatattgtacatatttcggtgtcggtttgccagacgggaaaatcatgaatggaaggaaccgtgtcagcattgttccaagcacgaccattgcaatggtgatcatttgctgcgtcatagtcatcgtcatacggaaacctcagctttctccaatggttttctcagaacagtcagtacccctaaaatggcgagcatagcaggaataataaattggtttccgccaaaaaggataagacaggctactgaaagtccaagtcctgagagagcactgtaatgctttttctctttcatccattgttctatgaatatcacaataaacagagcagtcatcacaaaatcaagcccttcggtattaaacttcacgtacgacccaaaaatacctcctatcgctgcccccgcgacccaatataaatgattaagcagtgtcacaaaaaacataaaccagcccttgtcaacattcgccggaacattagcggtataattgatagaaaatgattcatcgcacattccgaaaatcagataaagctttttctttccagtccccctgtacttatccaacatggaaattccataaaacaaatgccgggcattgaccattaatgtcaaaaaaagagcattcatagggttgaacgcaccaagtaaaaaattcgctgcaacaaactccattgagcccgcaaatatcataaaactcatgatgattggatagattgcgctaaatcccaaagaatgcataaagattccataagctatccccaaaaataaaaaccccgcaaaaatcggaattgtatatgggaatgcagaacgaaatgcagcccatatttgacttctcttattcatatgagtgtttatagcaggagagcttaaatgtaacgattctttatttttattcaaatcaacaacctcctacatttcatcaattggcacacttacagttcttttttctgtactcatgactatgcttgtgtcaactccactaatagcagggttctgcattaatgaatcaatgataaaattccgataactctccatgtccttcgccacaatcttaagcatatagtcatggcttcctgtaagtgtgtagcattcttgtacctgtgggaatttgtttatatcctctaaaaatgaatgaattgtctccctatttaagggtgataagttgatgagagctagtgctgtgacttcgattccaagttttttctcatcaacaatagtcgtaaactttttaattatacctgcttctactaggttctttgttcttgcaaggcaagctgatggtgaaagcccaattttcttagataaattcagatttgatattgaagcatcttcctgcaattctcttaagatggccttatcagtttcgtcaagcataatacccatttcataacccccaatacgacttaacagaattacatttcatccgatttaaacaataacgaattttcattcgataatcaaatattttttaaatttaattccttttaaaatattattcacagaataaaattatccccatgattacctcataattaaattaacttacatcagaaagaagtcatgggagagttatgtacttgtgtgacttgataccaacatcataagaaacttatcagaagccaaaaagttattgcggtctcaccgaaaattgaatttgcggtgccctattgcctttttctgcgaacaaaaattgttaaaattcacaaaacagaaagtctactctattattattttaaattcgtcctctagttcctcttgagcctcttgtaaaacttctaatacatcatctgcgtatgaacctaaaaatgtattgctgaactcaaaatttttcaagactaaagtgagcggcaaatccacccaccctgtcaggcaatcccataaagcgtctaaatttctcccatagtagtctgggaagtctagtttatcttttaaaacatcatgtaaaacttctatattttcaaagtctcttccatctatcattatttttctcattagaaactatgccctccattattttatcttaacaaacgttttctttgtaacagctgtttgtccaaatgaggctgaaaacaaataaaaaacaccgatagggggaaactattggtgtttacaagacattttcatgcccggtaggcataaataatgctaaactttgtttttgaaaagctatcatatcaaatttttatgttacagcttttactatcgtttaatctaattgaggagtaaaacgaaatatgtttgaaaatcacatatccccaaaaaattaaaaactaagcggcagttcttcgattgctctcatcagaaaattccctttccatttcatttgttccttttcgccttttaactgtatatttggacagcggcgtaataaggtggaaatcgcaatcttggcttctaagcgggctaactgtgcaccaaggcaaaaatgattgccatggccaaaagcaatatggcggttgttctttctttcaatatcaaatatgtcggcatttggaaatatcttctcatcacggtttgctgatgctaaagaaatgatgatcacatctttccgtttaatctcctgcccatgcagtataaacggttcagccgtccagcgaattgtcgttagctcaactgggctgtgaaaccgcaatgcttcttctatggctgaattcatcaagtctggctgctggcggagcttttcaaattgatcaccgtgacacatcagagcatatgtcatattggtgattaagtttacggttgtttcatgacctgcaacgataagcagcataatcatcgagtacaattcttctgtacttaattgtgtgccttcactttccgcttgaattaatgcactgattaaatctcctgcaggttctctcctttttttgcgaactaaggattccagatattcaacaaactcccctaacaagtggtcattctcctgaagtctttcaggggcatctgaaaaatcaataattacttgcgaccacactctgaatttttgacgatcttccaagggaatgccgagcatttcacttatcacgataatcggcaatggaaacgcataatcgtctactaggttcatgaatttgttgggctgcactttatccaataaagaatctgcgatatgctggattttgtcttccaactgcaaaatcatccgatgcgtaaatgctttttgaacaagagttcgcaagcgattgtgatccgggggatctgaattaagcatatgttttgttaaagactcttcattcttcaatagagcaggacgtttttcttttgcggtaaatacattttcatagtttttctttaatttttcattctttaataaatgtattgcatcatcatatctcgatatgagccagcctttccccagagatcctaaagataatgggtagagaggctgtgattttcgcaattctttataaaattcatacgcttcatctttaaatgctctcgaagacaattgactttccgtcaagatggttacactctttttttcttttgaagacattcattcgacctccatctttatgaaaggttatgttaatctttaaatatataatcagtacgatttgtaaaatgatctattgagatcagtattcatgctaagggccaaaatgccgcccccgcattttgaaataaaaggtatgagacagtcattaatcattttgctgcccaaactctttccctgataagatggcgaaactcctaatacttctaaataccatgccggctcttttaagtatttggaatattttccaacttcattagtcacagtcactgtcaacatgttcaatactgaaaatcctcccattttgattaatgttatcccccctgctgctatataatcgatcaagttaatgtcgggtttatcacgatgttttaatagagcggcaacaaccatttcaccattactgaatgtcaacaaaaaagaaatgctttttaaaatatgctcttgtcagtactttatgcatttcaaaaataaatgaatgatctttttttcgcgttttacgagtaaatccataaaaggatattgattgaaagattcatggagtagctttgccacttagcttattcatctgccctagcttgtcgataaagaaacattgatacatctcctctgagcaagtaaagaaggaaatcgaattaaagcgcccttcctattggaaaggcgcctgccgttttactgtgccaaaatgtttttcatcagtgagtttttataaaatcatttattaattgatcagttgtcaatattgtggcaaattcatcatgcaatgtagctagagatatattatgaatagtcgccgcatcataatatgtatcattttggtctctcattccgaaggctgctgttgcatctgaaatcaggtatgtatcaaaccctaaattaccactcattcttgtggtggttgatacacagtgaggcgtggttaaaccagttatgactacagtgtttatttcatttaattttaagaattcttctaaattcgtaccaataaagctgctatttactgtcttggttataatgacttcttcatccataggcttaactatttcctttatcgcaaacccttcattctttggatggaataaagaatgaggtttatcagaagtgtgttgtatgtatatgactgtccatcctttttctctccataattttagtattttactaatattttcttccgcctttacgttattccgttccccccattttttatcatcgaaggctttttgtacatccacaatgattaaagcttttttcttttcttccacaagataccctcctacgtagaatttctatttattactacattctaaatacaaattttacttttgtacaattgtttaatgatgaatttcgaatgagcgccttctttattgaaaaatgcgttctaaactgcaactgtgcccaagccgttaaccttcaataatctaatctgagaatcactggctctacagagaatgataaaaagcactctaataacgagtgccgaaatgaaaaactattgatttagaagccatttgatacgctcagctgaaaagatgtagtggagtattattagacataaaaagacaataccaactggttttaaatgactaaaataaagcgctgcaacagccagtgcaaagatcaataattcaataactagccttgttaccccgtttacagctattacagtttgtccacttcgactaggatcattaggtactgcaaatacagaccagacaatcataactgcaataggtaaaacccaagttaaaacatatttaaaataaccattaaagcttatccaagcaaacacccctaaggagattagtgcagccatttcaagggtgaatcttaaaagtaaattagtctgattcagtttttccaactcctctataaaaaacacccccgcaggagatgctctttctctgctttatttcagcgtataaaaacttttctgttcttcctatttagattctattgtagttttcggcgagattacctctacttttgaaaagatgataccgactgctgctgttaccaatgctccgataatagaacgatgataagtataatgaaatatgacaacttttcccctcctatccagttaattatccaaataatcaggaagttgtctacaatttgcagaatttgtcgaacgaagtaaagaatataccataaaagctgaatattgacctcgcttatcgctgggaggctttactcattgtatgaattacagtaatacactaccttcccttttgagaagacgttcctctcttatatccatttgttgcaacttagctagactcttccaataggcttccttttggcgcagctgcttctagtcgaaattgagcaacacctgaatgtttcattggaatttctgaaccatagatcgttgctgaatttgttgcaaatgcatacataggagtagtcgaatggtggttgaaaaatgaaatgaattacccacctccagtgatggcagaaaaagcgggggttttgttagagaggaatctatagacatgtgtatctagaagatttgacagcattaaaatttatacttacatcgttgggaacaggccaacaataaagcggaagaacgtagtcatttgaagtggtttggaataaaaatgattcgaatatgttcttatcattgataaacgaacaaaaaaagaacatgttttgaaaaaagattgatcaaaacatcttcttatatgttgtcatagcgtaactttttataaaaaggttgattacattttcggggcttccaaaccaaattttgcccattcttcttttgctggaccataaatacctgaaacagttaaacctgcttgtctcataagaacagtcatttgtccccgatggtggttttgatgttgaattaaaaacatcaaaagtgaaccgttaggcaattgttgtccaataaagttgatacgttcttgaagtgtatggtcagtccattgggtttttaatgcctgtacaaatgcattactggcttgatgatagctgtcagctataaactgagccgaagttggaacaggataatcttcagctggggcatggaacgttaagtctgtgtttgaggtaatgatgcgaatagcagcaacagtgtgccaggcaatacggcctagagtccaattttgtgaagttatttcttgattaagtgattcatcagtcagactatttaatagtttctgtgtagcatctgcttcgaactcccaagatttcaaaaaatggtctaaggtttgaaacacaaaaatcctcctttttattcttttgttttttcaatgtgcctataggttaattataatgcctcgtttcgttaaaaagaacaaaaattttggacaagaataatcatagtaaaatgcgtagaccttcttaaacataacgatttacgcatctttttacaaacatggtgactccttggtctccattgtcagcgagaatcaaatatcatatgaaaacaatcctatattcttattactttactgagcaataaatctcttcggtatacttagtgatgccttcatcgtaatcaggatactgatatgtaagactttctgatacagcttttgaatactttctaaataatgcatagcaagtaaataaagacttccacatttcctgatacccattcacagaatatgtagacatgagttcctcccattctttatttgaaaggtaccgtttcataaatttatagttcttccccatactaaatgaataccctttctgagatgcgatatgccaggccatcattctcaataaattaggacgtacaatttcatttaaatggtcaatggcaaaaaggatttcatttcttgctagtccttttactacgtaagtcgaaaccatccagaactcattacagcaatcatcaaattcccttgcagtcggctttttcatccagtattggcgatcatttggggtcactttatagttgatgaacgaatccttatcgagcaagaccttaaccaaaccatcgttattagcaaaataatcttctgcttcacgaattggaataagggttagatctaatttgttcccatcctcaaaaagaatgatgtatgaaaaccaattacctaattcgggaggaaaaagctccatatcttctggtttttgcatcataatgcgcttcccaaagatttcgagccactgatcattttctttaaaagaatctacatcagttacaaaatacgagatgtcataatcttggaagttgtcaggagggatatttctgtttgtacgtgacccttccaaagtgaccaatcggattctctcatcgttcaaagcaaagtccaaaaaaatgtccatcatttcctgctcacttcgcattacatgttcctccgtttcagccttaatatctaactgtaaaaccgaatattgatctgtacgtcttatagatttttttactcttgaatgtgatgtattcttctaagctttattttacatgatgttctcctatatattattcaatattaagatgcaagacatctcaaaatcagatatcaactatgacggactacatgaatattcagttttttgtagagccgccatgggacgacactatctttgacacactttaatcccccctgctttatcgacatgttaactggtatgagagattgacaaaaagaaggaaaacgatatatttaagcgaatacgagtttttgagtaaattttaaaatgacacttttttcaaaaatcatgtcttaacggggggattcggtatgaatgaatttatgaagaagttttccttaacaaaaccgattattcaagctccaatggctggcggtattacaaagccccgacttgcatctgcagtttcgaatcaaggtgctcttggcagcttagcatcggggtatcttacgccagacctgctagaacaacagataaaagaaatgtttgagctgacagacgctccttttcaaattaatgtgtttgttccgcttggtctagaaatgccaccaaaagatcagattaaaaagtggaaagaaaacataccgttagctaatcaagtaaatcaattcacatctgtacaagaagagtgggatgacttctatcaaaaaattgatctaattttaaaatacaaggttaaggcttgctcattcacttttgatctgccgcctgaagacgcagtaaaggagctaaaaaccgctggatgctgtttaataggaaccgcttcaacagtagaagaagcattgttaatggaagaacggggaatggatatagtagtccttcaaggaagtgaagccggtggacatcgcggagcatttttaccttccaaaggtgaatctgccgtaggtttaatggctctgattccacaagcagcagatgcactgagcgtacctgtcatagctgctgggggaataatagaccacagaggagtaaaagcagctttaaccctcggagcccaaggcgttcaaatcggttctgcctttttaatttgtcacgagagtaacgcacatccagtgcataaacagaaaatactagaagcaaacgaagcagatacaaagcttacgacattattttcaggtaaagaggccagaggaatcgtaaataaatggatggaagaaaaagaacagtttgagacacaaacccttccgtacccttatcaaaatacactaacgaaggcaatgagacagaaggcttcacttcaaaataaccatgatcagatgtctttatgggcaggtcaagggatacggtcattgactgaggaaatttcggttaagcagcttttaaatcagctttgccaagaggatataaaaatataggcgcacctcattgatagagcaaaaagcaaacttcgacaggcagtttgcttttttttcgtaatttcatcccctgactttggaaatttaaatactcctacattttcaaagctaattgaatcgggttatcaatcatcccactgatacggtgcgatcttgatgatttcaccacaatacatcaccaacatttcgatcttatctccccttctccagttttgctccctattcgaaaaatcgatagctcccatattaaattcgaatagtaaaatggttctttttcgtttgattcagatgatataaagtcatatgataaaaaaagaatgagacagaaagcgtgagaagtgatgaaaataggattttttgattcaggaattggtggcatgactgtattgtatgaggccataaaagttcttccttatgaagattacattttttatgcagatacgttaaacgttccatacggtgaaaaatcaaagattaaagttaaagaatatattttcaatgcagctgaatttctggccagtcaaaatatcaaagctctggttattgcgtgtaatacagctactagcattgcgatagaggatcttcggagaaacttcgactttccgataatcggaatcgaacccgctgtaaagcctgctataaataaatgtacagaggaaagaaaaagagttctggtagttgctactaatttgacgcttaaagaagagaaatttcataatctagttaaagaaattgatcaccatgaccttgttgattgcttagctcttccaggactagttgaatttgctgagaactttgattttagtgaagacaaaatcattaaatatctaaagaacgaactatcttcttttgatctgaaacaatatggaacgattgtgttaggatgcactcattttccgtttttcaaaaacagttttgaaaaactgtttgggataaaagttgatatgatttcaggcagtgtcggtactgcaaaacagttgaaaaaagttcttgcagatcgtaatcagcttggtaaaggctcgggctcaatcacctttttcaattctggccataaaattgtagaccaagaagtcatatcaaagtacaaaagattgtttgaaatattagatgaaaatcaaaggagtcatgttggacattgaatgtaaggggctctggttataaacaatttttcagtaaattcacaaaagagagaagtatgaattcgggtttgttatccaatgtaaatgaaaaagacagtctcatgaagaaaaacatgaactaagaagcgggcttaaaaagcccactttttttctaacaaacaattgagttatgcacaaatatctgattacagtgttttcgctctttcccctcttatttctaccccatctctatagcttttctatttcaataaaacacaagtctcgattgaaaagttatcgtaacatttacacttcacaggacatttttcgagattagaaatcgaccgtttgccagatacacaaagtcataatgtgtaaattctgtgtctatttgcatgtttattatggaattattttcataatgttttataatacaagatgatagcgttttctaattataatgatagggggaaataatgatgatgaaaaaaggactgctcgcgggtgcgcttacggcaactgtgctttttggcacatgtgcagtagatgtgccgggtattattagtccaaaaaccgcagaagctgcatcacagctaactgatggaatcggcggaagggcttacttgaacagcactggtgccatttttgttacgaaaatccagcttcctagctccattcaggtttcaaatgggacagcctacatctactctggctttagcgggggcacagaatccgatatcgggcttcagtacagtgataaatataatgtatggaaaccatatatgaaagtcggttcaaaaggacaggatcaggttcagtacctcgaaggaggaagccaattcacgaatacgaaaggcttccgtcccggcagcaccgtacaacttaccatctacaaaaaccttaacggcaatacacgcgctacatactggggcacaaacaatgcgggatacaacggccgtctcatttcagagatcagcaaaacaaatgtcggctccatctccaaatggaaagcgctcgctacagttgcaacaacaggttcacgccaatctatcaaatcaaacttttcaacatcttttacaaacatcaccatcgacaacaaagcaataacacctgtaattgatacacaagacttcgctaaagtaacagtctcaggcaacagtgtcagtttatccgttgtgaaaaattaaaacatgttaaacatacaatgcgttaggctattgagaagctctcgatagtcttaaagggggcttaacatgccccttttttcatttcaatttaactttcagttagcttcggtgcatgccgtctatccccgtcttttatctgggtgaagtaaggagcagctcgccccttctgagcctgttccatttgctcaacgcaaaaggtgtgcattactgtcttaaaaatgttaaaacaaatggcagatggtgcactttatttttagatgaggcatgcttacgctcgatatgcaagtcaaatgattaagggtctgcaagagagagaagttttgggtgtactttcataaaagagggatgtcttcatatagctcgattgcaccaggaacattaaccagcgattggccgagaacaacacatcactttgaaacggattcattccaaaataataagtatgatcaataactaataaagatcagttagcagtccagccttaaaaatatttttacatcaagtaaactagcatcactatcgaataagctcgatctgcatatcatgtactatcctcttttaaggaaggtgatgttatgaggtcatttccattaattgtagttctattcatcctattaatcatcgttgggacatctttctttggtggctattaagaacacaccttacctcatatccatcagacgccataagaaatctttatggtgtctgttttttattagatttaaacaaaaccattaaagtggggccatgcaaacacacctatggagattactgccacgacttctttgtgagggaaatattcttccctttatggactattgtcgatcaaaagagaaagttgaaatacctttttatggtgagatgaatcgaggcttagacatataaaaaaccgcaaagctttcttgaagaagctttgcggtctttgggtctcttctttgcttcatataagccaatagatttcaagcgtaatccactgccatacatccaatgattttttattttgaaataggtttcttctactcttcctgtgagatgactcaaggtatgccacgtcacaataatgtggcggatcctgagtggtctcaatcagttttttccccattctatcaattctccacagaaaaaatggctatggcagaacaactttcatagagtaatcatcatttaatgagccatcatctcatgggcaatatcgtgtccatccatttttgacgggtagtaggtaggccaatttttgacttcatcaagtaaagcttcacggtcgtccccccaatagagatgataatgactagctttagtcgggtaaatactatgatcactaaactgaatatactgaggcagctcttctgcttttttagctagtttgaatatgtatcttacccctctattgcccgcatcataggtgagaatttcgtacccgtcatacgtatacttaccagaatattcttttccatttttgaagaacgttacagtatctttctggattacaatacggtcaacatctgtttgatagccttttttataatactctttatattcttcagctgtcttgccgccttcgtgttctgatttatatgaaaacacttcgtcaagagtaccatcttgcaggtatggatatacagattgccaatctccttcccaatcagaaagtaagcgatcctttacttggctgtttttaaaatagccttcatatattttttctgtttcttcatcatgcgcatgactatgatcgtgagaatgttcttgtgtatgactgtcagatgtttgctcttgcgttttggaagagtcttcttcaactgctgaggatgatgttgtttgattagactcacctgcagaagaaccggaagtctgacatcctgccaatacgagtaatgaaccaatcgttaatatgcctagccgctttgaaaataaaatgttcattccaacactcctttttattaaatcgaaaacattacgatttatattatacatacatctcttgcaaacatcaaagggaaaatgctcttcatgcggatggactattttaaaggaataactgactttgttcatcagttattcctttaaaatacgaaagtctacgatatttccatatcgatccgcttcaatattacagcacccctcaagcagctgttttaattttccccgtccgcgttgtacccttgattttgctcctgagtaagaaatgccgagcttttcactcaactctttctgtgataacccctgaaattcagttaactcgagcgcctctcgatacttttcaggcaaccgtttgatggtcgatcgaatacacacagttgcttccttggtgaaattttcttcctctgcacggttattaaaatgtagatcatcaggcaatatttcgcttgttttttttgtacggtaaaaatcaataatcgtatttctagtgatccgataaatccagctgtcgatcttttgttcatcgatcagatttgggagatgcacttgtattttcataaatacgatttgcaagaggtcatcaacgatagattgatcgttaaccctttgtgaaatatatgtttttaacggctgatgaaattgatcccatagatcctctatattcatttgaaaaaacctcctataattttgcgtctgctttacatttgcttcgtctttttaatcgtaacaaagagcgaaacaattgttgaatcaattgtattgcagctgttgcaaaaaataatgataaaggagaggtttgttgtggagtatacctatttagggagaacaggattgcgggtgagccgtttatgtttaggcacgatgaattttggagttgatacagacgaaaagactgcgttccgtatcatggatgaagcgcttgataacggcatccaattttttgatactgccaatatttacggctggggcaaaaacgcaggattgacagagagcatcattggaaaatggtttgcacaaggaggacagcgccgcgagaaagttgttctggcgacaaaagtatatgaaccgatttctgatccgaatgacgggccaaatgatatgaggggcttgtctctatacaaaatcagacgtcacctggaaggatcactgaagcggcttcagacagatcatatcgaattgtaccaaatgcatcatatcgataggcggacaccgtgggatgagatatgggaagcttttgagactcaggttcgctccggcaaagtagactatattggatccagtaattttgcaggctggcatttagttaaagcgcaagctgaagctgaaaaacggcgattcatgggactcgtcactgaacagcataagtatagtttattagaacgaacagctgagatggaagtgctgccggctgcacgggatcttggtttaggagtagtggcgtggagtccccttgcaggagggcttcttggcgggaaggcattgaaaagcaatgccggaactcgtacagcaaaaagagcagatttaattgaaaaacatcgtttgcaactcgagaaattttcagatttatgcaaagaactaggagaaaaagaagcaaatgtggctttggcatgggtgctggcaaatccagttttaactgcgccgatcatcggaccccgaacggttgagcagctgcgtgatacgataaaagccgttgaaatcagtctggataaggagattctccgcatgttaaatgatatctttcccggacctggaggagagacacctgaggcatacgcctggtgatacattcattactcaatactgacatttttcttaaatatttatactgaactatcatattaggaaagacaagagcttgtttgtctcttgtcttttccacatcatgttgaaaatgctggctaaacatcgacaaaaatgctgccgcttctaaaaaagaaccctaaacaatagagtaactggaaagacaactggcttgatcagcttgggacccctttcagctgtatttaaatcaatcaaactaatgattcattggcagtctaaatattattattgtttgtttacaaaatagtaatagcccctgtaatgattgctaacaacgtaataactaatgatgtaattacagcccacttaacggcaaacctttgaaatgaccccaagtccattttaagcatacttactaacagtagtgttgacgcaactaatggactcatcagatgaaccggctgccccattatagaagccctcgcaatttctactggttctataccatatgctgaggcagcttctgcaaagataggtaccataccaaagtaatatgcatcatttgataaaacaaaagtaaacggaatactagtgagtgctacaataacggggaaaaaccctcccattgatgagggaataacggatattaatgatcctgctatggcatccaccatctttgtcccggataatataccagcaaatactcctgctgaaaataccaataatactacagttatggcattaccagaatgctcggcgattcgctccttctgcatttttacattcggataatttatagtaagggcaagaacaaaaccaattaaaaataaaactgacggatgcttagttccaagcacaataaacaccatgatacttataacgaggaataaattaagatatattaagcgtggccttttcaattgctcgctctccaaactagcagccatataagattgagagctgtcctttgttatatgtctaggctctaattgaacgatgcctattcgattcctctctttccttcccattagaaaagccagaaatatcacacaagcaatacctccaagcatggtcggaagtaatggcacaaaaaaatctgaaggatccaaacccagcactgaaatcgctcttgtagctggtccgccccatggagtcattccgctaacgatactcaacgacagcattgctaatgtcgccataaccatgggattcataccaattcttttatacaaaggtaacattgctgagactgttatcatataggttgttgtaccgtccccatctaaagcgataagcattgccaagacggcagaccctatcgctattttcacagggtctccctttactatagataaaattttttctattagcggatcaaataaacctgcatcaattaaaattccgaaaaaaagaatagcaaacaatagcaatgccgctgaacttgcaactgtttgaattccttctaaaatcatgtcgccaatacccttaccaaaacctccaataagagcaaaaacaatgggagtgatggtcaaggcaacaataggcgagactttctttgtcattattaatattgtaaaaacagttaccatcgaaaaacctaaaatagtaagcatattacacctccaagaatgcgctttcaaatgacttttgattaacatatcttatacggtgtaataagttaaataaatatttttttactgtgtttcaaaaaaaattctatcataactttaaatggttaccatttgttcaccctttaaaaaatcaatgaatgctttaacgagtttgattcctaatgatttttgatcgtacattagccaagtatctctcattagaggcttacccttagcattatacagttccattgtgtacaaatgatcagattcctgcaggcaaatttctggtgctatggagtaaccaagaccatgctttaccatctctttgcaagtctcttgtcgatccacttccattgcaataatgggggcttgttttagattcgtatgcatccaatcttctataatcgtttttaaagaagcatccgttttatatttgataaaaggtaaaaaaggaagctgctctatcgttattggtttttttgagatgatatgtaatttttcccgtgtcagccgttcctccacccctttccagcgatggcttcctctcagtataccgacttgtacaataccagcatctaataatttcatgacatctgtgctccagcctgtttgtacactatattggacattaggatacatagtggaaaattcccttaataacttagggagcttatattgagcgaaattgcttgatacccccagccttagatgtccttgcacctctttgcttagattagagatatgatctttggtatcttgaagttcctgtagcattcttcttgcataagcaaccaagtgttctccttccgcagtaaaggtaattcctttatgccttttggtgaataattcaattccgaaaatctcctcaatcttattcaaccgataagtgatggaaggctgtgatgtaaataatcgttctgctgtttttgttacactttgttcttcgtgaagaattttcaataaaatccaatctttctcatccattttcatcttcctttctagtccttctttcacaattataaaagtttttttatcgaatattaagaaaacttatattttatttttatttttttaccttctacactaaaaaacataaaaaatactacctttaagatgaggatgatgacgatggtcaagacgaatgtaacaatcatgagaggcggaacaagcaaaggcgtttttttccacgaatcagccatgcctaacaataaaaacgaatgggagccctttttgcttgatgtcatgggaagtcctgataaaagacaaatagatggtttgggtggcggtaattcccttactagtaaagtggcaataataaagaaagcatatacttcggatattgatgttcactatactttcggtcaagtcagcatttcggaagaaaaggtggactttaaggggaactgcggaaatatctccgctgctgttggtccatttgctatcgaagaaggacttgtaaaagcgacagaaccaatgactgcggtaaggatcctgaataccaatacgaataaaatgatcattgcggaagtggaagtggaagacggtcaggtcaaatatgacggagatgttacgatatctggagtgcctggatctggatctccaatctatttaaactttcatgatgccgctggttcagttaccggtcatttattgcctactggaaatagttcggagtttttagatacaagtcaaggccaaatagaggtgtctattatcgactatgcaaatccattagtttttgtggaagccagcagtatcggcctggagggaacggaacttgcagaagaatttactgatttacagttggctcaatttgaagaattaagatccattgcggcagagaaatgcggctttgccagtcgattttcagctacaaagttatcgccggctgtccccaaactggctatagtagcaaaaccagagaaatataaagatagtacaggtgcttggcattcaagcgttgagatggacttacacatcaggatgatgtccatgcaaaagccacatcaagcactggctgtcactggagcgatatgtacaacaagagccctttcagtggaaggtgcaatccctgcaagaatagcaaaaaaccactctacaaaggttcggctagctcattcttctggtattattgaaacaatggtggagcccactggtataaagatcgtccgtaccgcacgacgtattatggacggaacagtttatacgcatggagactatcaaatgatgtagatggactgtgcaaaaagcctccccctttccatcgttaatagatggattgaatgcgccttcttgcacagatccattgtaatcttgcatggctttaaaaaagcctctatattgtattttatgaaatcgccaaggtcctttcatgtatctgcctcaagcatgacataatcattatagagaaaattgaatactttttactgcaaataaaaagataccaacatcattggtatcttttagattgagttcatctgcagcggtttcttttcctcactgcttatttgattacaaaattaccgtactcgtttgaacgaacatgaatcggtccgtttagattatagttgttctccttggcgatagagcgaagcacgtccacacgggcaactgattctctccattcgtcacgggtgtcatgattggccggattcatcagatcgtcatagcgtacgtccaagaatttattcaaccacttcttctcgtctattccgtctttaggtgatccgcccgcttttttgttcgtacgtttaatcaaggcataaaaagagtcagggtcatcaccatcgccatgctgaataaccgtatcgtacatcacagctctagccaatgctgtttttagtccggcattatccgatcgtttcatggcaggctgataatacaaatggtcatttactttgtcttgagcggcgcgaaattccttatcatttgcaagcgacttccaggcagaagcgaatcccttgagattgcttgtatcatcgctttcttccttggccagacggcgcaattcagtcagatactttttcagtttgttattcggaactgcctttgtgtatacttctactacttccaatgcatccccggtagccgttgtaaagcccgcccgtccgcatgtatagcctcgcccgtcatccaatcgctctacatatccatattggatctccgttgtgccgttttcaaagatacttgtcagctgttccgcccggcgcttttgatctttattcagtcccgccgcaaaaaccgtttcgctcatcatcagggtaaaaaacatggtgaaaacaagtaatgagatcgctgcttttttccaaaaatctgctttttgcatactgattttcattttacttcccctttctaaatattgtaaatacagactcagtatacatgatgaaactgccctattgttgaaaatacatcaatttgtaaatattttgaatctaaagtaatatagcttgaatcttactcttttcattgccaatcagccttagcccctctcactgggaaggtccctttcatactgcttcaactttcattaacaagatgccataggctttactctattttataatggaagtgatcatcgaaaatcgttagggaggtgatgtaaatggcaagcaagatgagaatgccagattccgcaacgtcccatgcaaagcctactattgggaaggcgatactttgcatggggtagactttctaaaagatcgcccaagtaagcttttctgatatagtggctttgcaccttatttgacataaaaaaataaggagctggcagaaatggcatatgtaaaagcaaccgctattttacctgaaaagctgatatcggaaattcaaaagtatgttcaaggaaaaacaatatatatccctaaacctgaatcctctcatcaaaaatggggtgcgtgttcaggaacaagaaagctgatcgatgacagaaacgcttctattaaaaaagcatttaaaaacggcaaaaccattcatcaattatctgatgaatatcacctctctattgaaacaataaaaaaaattgtctactctaaataaacaaaacggaagcactgataaaaaataatcagtgctttttatatggcgagtttgtttcttagttatttcctgcatatgataccattggccaattgtgtaaagttaagggagatgagaagaaaggaaggtcctacaaatgacgataaacaatggaacgttgcaagtacccggcgcgaacatccactatcaggtgcgtggctcaggtccaatcattcttttggtccacggcggaggcggtgatgccgacaagttccatcatgttgccaatcatctggctaactggtactcggttgttacttacgatcgccgcggccattcccgcagcaatctcgccaatcagattgaggattaccgtgtggaaacacacagtgacgatgctcaccgtcttctagccaaaatcaccaataagccggcctatgtatttggaagcagctccggggctgttatcgggcttgatctgtgcatacgccatcccgaacaagtacatgtcatgatcccacacgaaccaatcttattgcagcttctgcatggaaatgagctgaaacaagccgagcaattcatggaagaccttaagaaaaatcatcaaagtgaagtcattaagttcatgtcaagattagagacagacgaacaatcaaaggctgtgctgacaaagcggcttctcggcaattcaacgtatttcactgagtatgaaattcaaggaattctcagctatacattagatttcgaagcattaaaaactgtgtttacatcttcaccgatgaagatactcccagctggcggaagtgcttctcgggagctttttccttatcgttgcgcgaacgccctagcggaacaattggaaacagaatttgttgaattccccggaaatcatacggggtacacaatgtaccataaagaattttctgagaggttacacgacatgttagaaaaagaaaataaacatacgtgttcaaaataggacaggtaaaactaactatggaattggagaagatttcacgaagcgtaaaaagaacttttcactaacgagaacgcaatgtgagatgtttaaccaaagtgatattagggatttcatcgaaaaataggtttgtacattacgttctcctattgattatttcctatcttaattccgtattttataccattagatacaactctaaagcggctcgttattttgtcctcaacaacaaccagtgtctaacatcatgaatctcttttgaaaatcaccacaaatgcaggtatggaagacttcatcgcagcaaaaaccataccaactattgttgttggtatggttcgtcctagataggcccttaagaagagattctattgtacggagtatttagctaattgcatttgtaaccgacagggccgtctgaacctgtgtacacatatgtgtcagacacatatccaatattcacgacaccccgggaatctttccactggatttggtcccagatattactcgttccatacttccctgtaacagtcgttccataagcgtaacaataataaggaacacgggagccactcggaatggaaagcataataggataatttgtaccaggaccgctgcgcatattgacaggcgcaccgctgcttgttgagacagtaaagtactgcacggcaagtgcctgactggaaaaaatgaataaagatgcaatcatcacggttaacatactcagcattttcagtttagtcaatgtcatccctctttcttcaattccttcattttaagaaacgatagaacaatgctaccagctgcatttaggaacaaccggaccgtctgagcctgtatacatatatgtatcagagacaaatccaggaacgatctccccgctggcaagcgtccgctctgtgtaattccaaatgttactcgttccatactttccagttacagttgtaccggttttgtagcaatagatcgggatgcgggttccgctcggaatagtcgttacaattccccaacttgtacctgggccgctgcgcatattgacaggagcaccgctgcttgttgaaaccgtataatactgagctgcaagtgcatggctagaaaaaatgaacacagatgcaatcatcaccgttagcatacttagcctctttagcttattcaccttataccctccccttataaatgccgtacgtttgactttcttacatccagttaaggatttactttcagataccatgccccctcccctctcatatatttatcaatgtaccataaactagatctttcaaaagtggaattattcctatgttttcgacaattaaggatacaaaataaatggtagtcaggcttgatattgatggtgtgttacatttggcatttgtccagtcggtaatcacgattgacaatcaggaaaaaggacatggatcaagcggtttcgtgtccaccaattaactcaatcagtgtacttctgccttgtatccacgcttcttctcgattcatagatactccacctttttcaccaatcaaaaacggacaccaaacaaatcagcgtaaatgctgcaagttcagtgtccgcaacctattatgactttgctttcttttaccagggcgtataaaaatgattaggtacgttatcaaacgttatattctatgattttgcgagtcgaaaaatcataacattttatatatttcaatcagattatgatctggatctctgaagtgagcaactcgggcactccattccttgcgatcatgcggtttatttacacatttaactcctttttcgtgtaaatcgtcatatgttttatcaacatcttctaccttaaactgaagcaaaaattttgattgagcttctccttccaacgattttttttcctctccaacgatttcagccatcgtttcacgagataaaagctctattttcgtttccccattatcaaagagtgcatattccatttcattctctaaccaacttattggaagtcctaatgaatctttgtaaaactccacgcttttcttaaaatcattcaccaacagtctaatttgtaacagcttcatatcgagtgcctcctataaaaccatactttttactggtcatccaatttaatgatacaaaaggaaacctgacagcactatgtcaagtttccataaataaatttcctacttcacctttatttcagatttaagtgcagtttattccatgtcataagaaatgtacgctaacgagcaaaaacagcgattcttaaaacaaaaaatgataccgagtgtattttctgtatgcttcaacttcatttcgggaaatgtaacgttgataaaggaggttacatcaatatggatcatcaaacattggcagctcacgaggctgttgacttacatgaaatcgtgaactttaaaacactttgtatagcgaaatcaaagttaatgcaaggacttgtgtttgaccaagaactgaaggacttgatgcaaaaagatgtacagcaatccattcaagaccttactgaattacaagcggtttatgagcgtgcctcatttcaggcccctgtccctcaaagccgcccaacgccaatcatcaattgaaaggaaggtaagcctctttgaataatgatcatttagaccccattaattcgctgaatgtgcctgaactagcagacactacattcgcgatggattttcttatacgagctaaggaaggcgtaaggaatactgctgtagctttgacagaaaccgcttcaccagatgtaagagccttgctgcggaaacagctgatgcaaggaattgcaatgcaccaagagattacggaactgatgatcagcaaaaaatggttccatccatatgagctgagcgaacagtataagctggatcagctctctgcaaaaaacacgatcatggtcggcaatatgaacctcttccctgatgaaacaaatcgtaaagggatgtttgaccggacacctgatgaacactaacactggaggttttacagcatgaaggcagtaacgtatcaaggcattaaaaatgttgttgtcaaagatgtccccgatccaaagattgaaaaatccgatgacatgattatcaaagtcaccagtacagccatttgcggatcagatttacatttaatccatggattcattccgaatatgcaagaagactatgtcatcggccatgaaccgatgggaatcgtcgaagaagttggttctggggtgactaaactaaaaaagggagatcgggtaattattccctttaatatagcatgcggggaatgctttttttgtaaaaaccagctggaaagccaatgtgatcagtctaatgacaatggggaaatgggtgcttatttcggctattcagggcaaactggcggttatccaggcgggcaagctgaatatttaagagtgccgtttgcgaattttacccattttaaaatccctgaatcttgtgaggaacccgatgagaaattaagcgtgattgccgatgccatgaccaccggcttttggagtgtggacaatgccggcgtaaaaaaaggcgatacagttatcgttctcggctgcggaccagtcggcctgtttgctcaaaagttttgttggctaaaaggcgcaaaacgcgtcatagcagtagactatgtaaactatcgcttacagcatgcgaaacgtacaaacaaagtagaaatcgttaattttgaagaccatgagaatacagggaattatttaaaggaaatcacgaaaggcggagcggatgtagtcattgacgctgttgggatggatggtaaaatgagcgatctcgagttccttgccagcggcttaaagcttcatggcggaacgatgagtgcattggtcattgcttcccaagctgttcgcaaaggaggaaccatacaaattacaggtgtgtatggaggcagatataacggttttccgttaggagatattatgcagcgaaacgtcaatatacgctctggacaggctcctgtgatccactatatgccgtacatgtttgaactagtatcgacaggcaaaattgatccgggagatgttgtcagccatgtcctgccgcttagtgaagccaagcatggctatgacatttttgattcaaaaatggatgattgtatcaaagttgtgttaaagccttaaaaaacggaggttacagaaatggaatacgccttacacgaagtgcttgaggttcaggaaatgactgcatttaagacactttgtttgacgaaatctaaaacaatgaaagcactggtatctgatccgaagctgaaagaaatcatgcagcaagatgttgatatcaccacacgccagctgcaggaatttgcctctattttatctaatgcaaagcacgaatgaggagatgaataaatcatgaatcctatcatagaatatctgactggcatgaatgttctaacagaccaaatcattgctatggacttattaatttcagcaaagaacggagtcagaaattatgcgatggcagccactgaagccggaacgcctgaagtaaaagaggtccttatccgccatttggaagaagcactcgatatgcacgaacaactctcaagctatatgatggaaaaaggctggtaccatccttggaaccctgacgaacaagtcaagctgaatttaaaaaatattgatacagccattcaattgccaaccctttaacatacaatgactgatttgctgaggaacagtattgattggccacaactgttcctcagcttcaaaatgagcactgtttgttcgggtcctatgaccgtaaatagattaaccgcttttctccatctgatctccgataatgtttgcaaattctccaatccaaataaggaatcgtaaccacctctttttatgcgatctcttgatggagaaaacaggccagaaacaaaatccttcgtttttgacctgccctcttcacacgcaaagaatgctaccttctttgctccactgatccgtgaagactttccgttttaggcctgcttttgagctttgcctcattttcacgcaatttcccatcataatctttaatttttgtgtctaatctcttaattgtttcatcaatttctttccgcttctctatcagccgctgtcgttcgtcagccaggatattttttcgagcttctaccgtacagtcaccttcggtaaataatgttgtatattcaattagcgcttctatcgatagtcccgcatttcgcatgcatttaatgaattcaatccatttgatatcttcttcatcatagtcgcgaatgccgctgtcttttcgttttacaggcgggattaatcctacacgttcgtaatatctgagtgttgcggctgtcaggccaaactgctttgccacctgagcaatattcatgatcttcacctctctatcctgcatgttgtgaaggtaacacttaaagttaactttaagtcaagctcaagacaagtggttagctgctgaatctgggtttatatattcgggacttgccttaaagcacactttaagctctatacttctccatgcaataaaaacagtgtagatggagggattgctgaatggcaaataaacaaactgccggaagagaacaaaccaaagtttgcttaacttcatgatgatgttctattcggtgacatttgggaaagagaggaagaacttccccccgagatcgcagcataattacagtttctacgttaattgctgactgtatctcaacttataaatcaggttcattttaaatgttattttaaaaaaacccttgccttaaagcagactttaaggtttatcgttatgttgaagacaccataaaacataaataagtgcatgtttttttacaacacttatgatgaagaaagggaaggttcatatgtgtaatcaacatcaaacccgtgtattaagcgtgtcacatgcaaaagccaaatttgaacaaacgacgattgagcgaagaggattacggccgcacgatgtcttaatcgatattaaattcagcggtatttgccattcagacattcatagtgcttttgatgaatggggcggtggcatcttcccaatggtgcctggacatgaaatagccggtgtcgtaacagccgttggagcagaagtcaccaagtttgctgtcggagaccgcgttggtgtcggctgttttgttgactcttgcggagaatgcgaatactgtctcaacggagaggaacaattctgcacgaagggtgttgttcaaacgtataactcagtagactacgacggaaaccccacttatggcgggtacagccaaaaaatcgttgtcactgacagatttgttgttcgcataccagatcgtttggaaatggatgttgccagtccgctgttgtgtgcaggtatcaccacgtattccccgctgaaacactggaatgttggccctggtaaaaaagttgcgattgtaggcgtgggtggccttggacatttggcgattcaatttgcacatgcgatgggtgcagaagtaaccgttctgagccgttccatgaataagaaagaggaagctctggaactcggtgcaaatcattactttgcaacaagtgacccagctacattcactgcattggccgggcgttttgacgtgatcttaaatacggtatcggcaaatctcgatgtagatgcctatttatcaatgcttcgtatagacgggacacttgtaaacgttggagctcctgccaagccggacacatacagtgtgttttccctaatcatggggcgccgcagcattgcaggttctctagtcggcggaattcaagaaactcaagagatgctggatttcgcagctgagcatggcatcgaacctaaaatcgaagtcatcggagctgaccaagtggacgaagcatacgaacgtatcctccgaagcgatgtccgttatcgatttgtgattgatatttccacattgtaataggttattccttatatggggctgacccgcttttattgaaactcacgaaaaacgatctcgttaagcaaatattttgaaggccggtcaatcttcctgttattctatgaatagagagttattaggagggttttttatgagcaaaaaaatcgcagttcttgttacagaccaattcgaagacatcgaatatacaagtccagtaaaagcatacgaagaagctggctacagtgttgtggctatcgatttggaagccggcaaagaagttaccggtaagcatggcgagaaagtaaagattgacaaagccatctctgatgtggatgcaagtgactttgatgcacttttaattcctggaggattctctccggatttgcttcgtgcagatgaccgtccgggtgaattcgcaaaagcatttatcgaaaacaaaaaacctgttttcgcaatttgccacggcccgcaagtactgattgatacggatcttctaaaaggcaaagatatcacaggctaccgcagcatccgcaaagatttaatcaatgccggtgcaaactacaaagatgcagaagtagtcgtcagccacaacattgtcacaagcagaacacctgatgatttggaagcatttaaccgcgaatctttaaacttgttaaaataacgagaaggcacagactgttcgggtctgtgccttttttaaaattaagactccttctttacattctgaaagacagcagtcgcgtcccacacattcaagccaaattgaccttctgaaaatgcggaatcatttgcatcaatcacaaggcgatcatctaaatagattttaaagcgatcgccctcggcctctgttttcagatgatacttttgattaacgtctatcggtgttttgtattcagcaatgacagaagcaacaccgttctcaaatttaaagaatttcactagatcatgctttgcatccacattggcaaggtaaccgtttttggcatctttgtcagagcgaaacattagtgctcctgcccctcttccgtttccatccttaatggtgatatcagattcataagtgaagtctgacccggatgctgaagacaagataaaggaatctccgtccgacctcccttgtttcccctcaattgtgtcggcccatgtgccatttacagtcgtccagccagtcatattggacataaaaggtgacgttccccataccttttttaaagggtgtatggttaaagattttacctttacgccgccatttgcagcatataattcaagccctttgcttgatcggtctgggagaataatatccgttatgacctgctttccgtcattcccaaatacttcaaccgaggagcggtcaacaaaaatgcgcatcttaaccttcccatttaccggcttcaatggggctgtttcttttccggtgttaaaggccggattaaaggtattgttgcccgactcgctccggtcaacgaacaatttggcgttccttcggtcatagccgaccttcgtaaattgattttcacctgttcggaccttaaaaccaaattcagcagctgaaccagggcttactttaaattctgcatttatttcataggcatctccagattgccccgctaacacattatgacttgcaggcgatatggtcagattcttccacttcttagaggttccgcgaatggtttccagctctttcaccggtgtttggaccactctaaccccttcggtaaacgctttcaattttaactctcttggaatggacgttgcacttctccatggggatgtcggaacatcattcgcatattgccaattgctcatccaccctaaccatagccggcggctgtctgtggatggaatatcagaccaggatacagccgcataaaagtctctgccgtaatccgtccagagaactttgtttggcgggttttcatttttaaaatgagttccatcaaagtcccctacaaaatattgcatgcctgatcctcccgagaccgctccgtttccgacactgacctgcatgacccatttcttttgattcggattgccgtctaccggaagctcaaataaatccgggcattcccatactcccccgtggcttccttgatcctgtccaaattcacttgcatacgtccactgcttcagattttttgatgtataaatgaggattcggtcaccggccgcaagcaccatcacccactttttttctttctcataccaaaagacttttggatcgcgaaaatcttttttacccgggtttggaatgacagggttgccagcatacttcgtccatgttcttcctttgtcgttgctataggcaatactttgcacttgatggccttcccgatcctgtgtataaatggccacaagcggcttctctttgcctgtttgaaaaccgcttgtgttatttttatctacaactgcgcttccagaaaagatcgtgcctttttcatccggatacagcgcaacaggaaggtgttcccatgtaaccaaatctttgctgacggcatgcccccaatgcatgggcccccactgaagcccgtatggatggtattgatagaacaagtgatattccccagcataatataccattccgtttgggtcattcatccagtttgcctccggtgtgaagtggtattgaggacggtaatcctcatcatagtagcttgaatcggctgcatctgccgaaaatgccatagtcaacagcagggtgaacatgatcatgacttgaataagtctctttttcatttgttccttcgctcctctcttcatgtttgaacactttcaagagagactgctgcgcaagctggtccgtttctggcaattctcctctgtttcactgttatccgaatgatttatatatgaaaagactgctgcagtttctctctctttccttcacacaccttatgctaagaatccagcccaatacccgagaatcccgatgacaaagatgccgcaaataatgagaagtggattcacccctttgcgaagcatccatgccaccaataacgttaatccgagaggcagcgcccccggcataatgctatctagcacgttttgtaccgtttgaacatctacttttccgctttcatccttaatcctggatacaacgattggaatgttgatggtggtccatttggacacgagagcccccataacaaataacccgagaatcgaagcgccctctgtaagcttttgaatgcgattccccgctaaatcctgaagaatctccattcctttcacatagccatactttaatccgtaatattttgtgcttaatcttatggcattcagcaagaaaaagaatagcaaagggccggcaatgtttcctcctaaagcaagggaggctcctagcgcagctaagacaggacgaatcgttccccaaaaaattggatcgcctacgcccgctattggtcccatcaaaccgattttcattccgcttatcgcttttccgtcaattcctttattgttcgccatttcttcttccatggctgccgtcacgccaaatataggcgctgtcagccacggatgtgtattaaaccattccaaatgccgctgtaaggcttcgtttcttttcgctccgggaccgtacaattttttgatcgccggtatcatgacataacaatatcccattgcctgcacacgttcgaagttaaaggaaccgagtaaaaaatttgaacgaataaacatgctgaaaatttctttcttcgttaatcgtttttctttctccattttttcttccccctcatcgtttaggcatcaagatcatcatcatcgtcatcataaacagcaacactgccactgtctgatgcggccgcgactgctccgtgagcgctttgtttttgcatcacctgctggtataaaagcgccagacagagaccaagggctccaaatcccactaagttaaaatcggtaaacgccgctaataagaaaccaatatagaaaaatggctttaaataaggaatattcatcatattgatcaccatggcatacccgactaccacaataatgcctccgcctatttgcagtccttttgtaatgacatcaggaatatttcccaggaacgcctgaacagcgctgacactaattaaagcaacaatcaatgtaggaatcatgacgcgcaaagcttgaaacaccatcgcggtaatatgcataatttcaattccttttatatttcccgcttttgcatattgatcagcgcggtggatgaaaaagacagtgatcgtccgaacaaaaatcgtcagcgcctgacccgcagctgctaaagcaacagcgacagcaatcccctcgccaattccttgatcagcggtaataactaaaatggttgagatgacagaggcgatcgctgtatcaggtgccatggcaagcccgacgttcatccagccgagcgccatcagctccagtgtgcctccaagaataattcccgtttttaagtccccgagcaccaagccaaccaacgtacaggccacaagcggccggtgtgtctgcccttcatccaatacacttgcgattccggtgattgctgcaatgattaacaacaaaataatttgtaatgaagacatattctcatccccttgattattttgctacgttccgtaaaatctgtacaaaatcctcactggcatctgaaggcagctgcctcaattccagtttcacgcccttgtcacttaatgtttcaaatgcctttatatcttgttctgtgacactgactgattttgtgatttgcctgcgatgattttcaaaacgcattcccccgacgtttacggttttgatcggtacacctgcttctataagagatacaatatcggacggattttcaaacaagagcattgccgttaccccttcgtagcgcggactatgaaatgcttttgccattttagaaaccgagacggcactcgcctttacatttgaaggcgcaacagaaaggatcagcgtttttctcatttcgtcctgagcaatatcgtcggagacaacgatgattcggtcggctgcatggacttttatccaccttgtcaggatttggccgtgaataaagcggtcatcaattcttgctaacacaatgttcatcataattcatcctctcttgtatcttgattggctgtttttactttttctaaatgttcactgcacacttgaaagctttgctgactcattgcttttaagttgttcagcaaatctttgagagccagatgttctctcaggcttaatacctccagcagaatcggcaggtttacgccggctgccatatccattctttgatcctcagcaataaaggaagctgccgcgttatatggcgtccctccaaaaatatcgactaaaaaaagcacttcatgttcttccgggatatccttgagcgcctgatgatatttttcttgcagcgtttgtattccttcccctttaaaaaacggcactgcaatcaggttattttcttcaccgaatatcatccctgaagattcttttaatgctatgggaaaatctccatgaccgctgataataactgaaatcatatctattgctcctttcctgttttgtacatccatatataatgcaaggatcgtgccaacacagttgtgttaagcgttttcattgttatttcagccaatagcaatttgttgtcgaaacacttaaaacgaaaaaaataaacctgtattaaaatggtgttccatttaatacaggttcatataaaaaaactgtttttaaaacagctggccatgcacttcttcagcaaatatggcggctataaataatttttcatcatcacttatgcgaagtccgagcttttcttcataaggggctaatgttcgttctgtcacgtacaccatttccttcagctgatcattgatctcttcttcctccgagaaagcgatcggattctgcttaattaccctttcaaaggcgaaagccgtgtgcataatgactttaatcaaaaccgcattattgaaaatgacccccagctcatcttgaacggtttgcagccactccaataacatttcgatcacatggtggggattcaagaagacaaggtattttttcaggctatcctcgcaaagctccctgacaataatatttgcttcgttcaatccattgctcaaggggatgcttccttttgtaatcgcctgttgaatcagcttctctccctccccttcaattaacacttctaaagatacatgcggagcattgattttagggtctttcgttccgactgtcgcaaggatttcatactctttttcgatttcttttatgctgttggccagtttaatcgatgatacggtcaatatgtgaatcggggtatcggaggccttgtttacgatcgtggttagaatgtcttccagctttttggccgttccgctgcccgtcgtgcagatggataccaatgccttctttttgccggatgccgctggctgacgctcccacagctcgataaaatccttcgtgaccgattgatagatcgcatgcaaatttaaattcaaatagttgacctttctgacagcatccagcaccattgaagtcgtaacattgctgatcgttttgatggaaatacctgtcttttcctccagcctgctttccagcattgcaagcgaccccatgtctaccagcattaaaacaccttcaccttcatcaacctgtttcattttttctgctacgcattcaagaatgtccgaaggtgaaacagaaagtggcatatcgactgctgcaatcggcgtgctccctagcagttctgtcgcaacttcaaccatcgaactcgccgtgctgtttccatgagcagccacgatgataccgactcttttgttctcctttaacgatttgatggaatggattaacatcgttaagtagatgacttctatttcaggaatagccactttaaaatattcctgaattttatctttaaaaatcatcgccacccgatattctttcacatgagtatcacgaatttcatcagtctcctgtgtattcaaaacatcaatttgctttcctcgctttaaaaatgcgtcaatatgcatactcaagaaataaataaacttgcggtcaaatgtacaatccagctcatgttcagctatttcttttaactgttttgtcatttgaatcacgtcatcttcaacgaatgtcagcaggttgtctttttgaaaagcttgatgatgaaaaaaacttctgacatgcaaatggacatcagtcaagatgtattggttaatatcctttttggataaaccttctttcataagcgttttcactttttcctcaatcaaatgatataagttaaatgaaaggtcttcgtcaatttttgttgtttcatcttctacaatcggagagataatagttgtaatattgacatattcagaaatggctttgcttctttgcatgtttttgctgctggacatccattcttgcttgatttcatcaggcagatcgcgaacagtcagttcaataacctcatttctgtcaaggttatgcaaaaatccgtgtgcgcaaactaactggacatttgatttcagctgtccgacattcccaaatttcgcagagtgaataagcgcattatagacatcgatatgcacactcagattcttcttaatccgctctgcttctttccctaataaaaacgtcgtcagatcgactctttctttaagcgatcgttcttcaagcgaaggaatatgaatggtcattgggattcttcgcaaaaacgttttcaatagtgcagaactcggattttctgtagtcgcacaaataaacaatacgttcgatgttcgtttatgttcagattctccaagcctgttataagaaccgctgtcaataaaataaaacagcatttcttgtccctcgggagggagacggtggatttcatccataaaaagaatgcccccattggcctgttcgactaaacctgccttatcctcggcagcacctgtaaatgaaccttttttgtgtccgaataattgagaaagcaataattgagggttgttgtagtagtctgcacagttaaatgtaataaatggtgcgccggccttcaatatgtcagagtaaatggcaaactggtaaattcggttcgcaaaaagggatttaccggaaccagtcggccctaggaggagcatatgcagaccgttcggcggataaaagacagctgcttttgcctgggagatcgctttcttcaaactcccttttgcccctatcataagctctaggggattcgtggaaatgtgttgatgattttgctttgaatttccggaaaacgcctgaaggtctttcacttccatcatctctgtatcccatttcttgttgaataatttttctgctatctcgactgggatgtatcttacaggaaacgttttaattttgatgacctttttggaccggacgagattgttcaattcaaagctgacattggaccgctccattttcagctgctcggcaatctcctttgctgaattcccttgtatttttaaaagatgatctaaggttgaatcatgaaaattatgcttgagctgatggtatattttatctattcttctcacgtctatcatcctttgtccttattagataagccattaacaagaatatttcgaaaatttatagtccgcgttgagattatctgctgatacacgtttaaaaaggtctctatagcagattgacaaaactggcttttatgcgtatatgtttacatgttgaatcatttgcatctcatattagtatgatagatgctcagttctcgagggccagtccccttcaaaagtaataatcagtaaacagtttatcattctcggggaatgtaatgatgtcaaaatcatcaatgacaaaaaatgaatcttatagatcatgacaaattacccaaatataaccccttaagttcgctcacaactaaaaagacgggcactctatgtgaccgccacagtattacaatttgcaaaacttcgtcatttttgcaaagttaaggaatctgtaagcttaaaaactttatctccgatatctctcgatttgatcccccctgtaggcctcaaacatagtgggtatgcaattatacaaatcgttaccgattaaaactagcctgtcagattgtccaaatgactttcctgttttactctgctattcaggtagaatcaggagtgaaaatagagccacaagacatgtaacagcacttaaaatagttttaaaatttaaaaataaaagtatctattcttttaaatgttataatatccgataaaactttacacatctttttattactggaggaaaataaaattgataggcaattctagcaaagacaattttggccagcaacagaaattgtctagaggccttaaaaacaggcatatacaattaatggcgattggaggtgcaatcggtacaggtttatttttaggttcaggtaaatccatccattttgcaggaccatccattttatttgcttacttgatcaccggcgtattttgctttttcattatgcgttcgctcggagaactgctcttatcaaatgcgggataccactcttttgttgattttgtaagggactatttaggaaacatggcagcatttatcactgggtggacctactggttctgttggatttccctcgcgatggctgatttaacggcggtcggcatttatacgcaatattggcttcccgatgtgcctcaatggctgccgggtcttcttgcgcttattatcctgctgatcatgaaccttgccaccgttaaacttttcggagaattagaattttggtttgcattgatcaaagtcattgccatactggctctgatcgtaactggcattttcctgattgcgaaaggtttttcggcagcttccggccctgccagcctcaccaacctttggagccacggcggcatgttcccaaatggatggcatgggtttatcctatcgttccaaatggtcgtcttcgctttcgtgggtattgaacttgttggactgacagcaggtgaaacagaaaatccccaaaaagtgatccctaaagccatcaatcaaatccctgtccggattttacttttttatgttggcgcacttttcgtgattatgtgtatctatccttggaatgtgttgaatccaaacgaaagcccatttgttcaggtcttctctgcagtaggcatcgttgtggctgccagtttgatcaattttgttgtattaacatcagccgcctcagctgcaaatagcgctttattcagcacaagccgaatggtctattcacttgcaaaggatcatcacgcacctggactattaaagaaattaacttcttctaacgtgccaagcaatgcgctgttcttttcatccgtcgccattctgattggcgttagtctgaattatttaatgcccgaacaagtctttacactgattacaagtgtttctacaatatgcttcatttttatttggggcatcacggtgatttgccatttgaaatatcgaaaaacaaggcagcatgaagcgaaagcaaacaaattcaaaatgcctttttacccattatccaactatttaacacttgcatttctcgcgttcattcttgtcatattggcactggcgaatgatacacgtattgctttgtttgtcaccccggtctggtttgttttattgattattttgtataaggtgcaaacccgcagaggacataagatgaaataaaaaaaagacaagggatactcactcccttgtctttttatatgtgtcaaacactaaattaaactttggtttcaaatctcattcacttcatttaagtgttaactcaaaccagttttgatgccgaaacctactaatattattccggtaattttttgaaacactttctggaacttcgagtttttcatccatttttttgcgtaatcaataatataaacaagaaacagaaaccacaacaccgctaataaggttagaattgaagctaaaatgataagctgctggtttatatttccgttcaaattgataaattggggcatgattgtaacatacactaaaacagttttaggatttagaatgttactgagtgatccttgcataaaggaagttttataataacgtttcggagaacttgccatattttttgcttgggattgcatgtcatctaacgaaaacatacttttagcaaaaaagctttttacacctaaataaattaagtatgccgctcccaaatatttgatcgttgtgaaaagaatcactgactttgcgattaccactgataatcctaaaatggcaatcaccgtccaaaaggaaagtcctgtcgccaatccgagaatgttataacggccggctttcggaccatacctaagcgtatttttcatcacaagcatcgtatctgcccccggcatgataaccatcatggcagcgatcggtatgtatgcgagtaagctgtgcattgttctctccccctttaaaaatcccctcaatcatatagtgactacaaaagtaactacttataaaagtgtatcaatgcatttggaataaatcaatatggtttgttaaaatagcgattactaaggcagcgattgctctttatattggaggatatatgaaagaaaatatgttagacattttaaaaaacctcaattttacagaatatgaatcgaaagcgtatttggcattattgcaagaatcacctttaacaggctatgccgttgccaaaaaatccggagtgccccgttctaaaatttatgaagtcttggaaagccttgtcataaggggagatgtttttgtcagtcatggaaatacacctcagtatgttccagtccccgcaaaagaactgattaaaaaccgccggctcaaagcggaagagcattttgatcaggctgagaaatattttgaaaagttcgagcagactgctaatgaccgggaaaacatctggaatatcaccggccgcagtgaaattcttgaaaaggtgaaggcttgtattttatctgccaaaaaaagaatcctcttagaaatatggaaagaggattttgaggagatagaatcagagctaaaacaggcggcagaacaaggcgttattgtcaccattattgcgtacggagacatcgtatctgatttttccaatgtttaccttcatgatatgagcagtgaaattacagaagagtatgacggacggtggcttgtctatagcggagatgattcagaagtagtagcgggcattgtctcacttggcaatgacagccgtgctgcatggacgatgcatgtaggtttagtcatgcctattactgaagtgatcattcatgatctgtacctcatggaaattctgaaaaagcatagagagctattagaagagagcttcgggaaaaatctcatccagttgcgccgtaaattttctattcactcagatttcaaaaaacattatttggaataatgtttggcatctcttaccccaaaaacaaggcttgtacaaaacaagccttgtttttttatgcataaaccccccatccccatgctgatttacttctctcttttaaaaaatgtgattctgcgcaaactatttttcagcctgccgcgtctatcctaggtaacagcctacgatatacgtatattcaaaaaggagccctttattgcaatgaagaaaaaacaaacaacaaaagcgttgcttgtcacatgcataactgatcataagcaagatttctaccggttggctttcagttatgtgaaaaatcaagatgacgcattagatattgttcaagaatcgataaaaaaagcgctgagctcagttgaaacggtcaaaaaccctgagacgataaaaagctggttttataaaattttagtacggacagccattgactttttgcgcaaacaaaaaaagataagagtgatggacgacgaaacgatagaatttttaagcaaaggaaaggaagaccattacaaggatactgatctccatgaagcgcttgacgaattgccgtaccgctataaaaccattattattttacgtttttttgaagacctcaaattagaagaaattgcggaaattacaggagaaaacacgaataccgtcaaaacgcgcctatacagagcattgaagctgatgcgcattcagttgacgaaggaggatctttcttaatggataagagattacagcaattaagagaagaatataaaaatgttcagattcctaaagaattggatatcattgttgaaaaagcccttcagcaagaaccaaaaaagaaaagaatcgtcatgtggccgacatcagcagcaatcgctgcagctattttattcactgcacttgttaatatcaacccggacgccgctcaggctatgtccaagatccctgtcatcggcaaaatcgtcaaagcgatcacctttattgaaatcaaagaggaaaaagaccaatcaagcattgatgtcaaaacacctgctttgtccgggctttctaataaagagcttgaaaacagcattaaccagaaatacttgaaagaaagccagcagctgtataaagagtttatacagtccacatccaaaaacaaaaaagggcatctcagcatctacagtgattacgagacggtcacagacacgccagatttactctctatccggcgcaatattgaaacaacacaagcatcttcctacacacaaagccgttatattacaattgacaaaaagaatgatattttacttacattaaaaagcttattcaaagatgagcgctatatcaaagtcatcagtcaaaacatcaaagaacaaatgaaacagcaaatgaaggaagatccaaataaaatatattggctcactgacgaagatgcagaaccgttcaaaacgattcttcctgatcagacgttttacattactgaagaccataaacttgtgatctcatttgacgaatatgaagtcgcccccggctatatgggcgttacagagtttacaattccaacccgtgtcatttcaaacttgctcgtgggagaacgttatattcgataaaataaaaacatccatctaagattatggatgttttctctcttctctattcgaggtcgtaacctcgctaccaaaaacaacgagaatatttgcatactattggaggaatacccatgtatcacaagacacagcatcatcgatacattcctggacttgatggccttcgggctttcgccgtcctgtcagttatcacttatcacctaaatttcaattgggctaacggtggttttatcggagttgatatcttttttgttttatcggatatttgattacatctattctattaccggcatatggaaatgatatcaatcttgattttcgggatttttgggtgcgccgcattcggcggcttatgccagcggcttaccttatgatcttttccactgttgtgtgggtcgtattgtttgatcgagaactattacacactgtacgtggagatgcgatctcttctctcttttatatgagcaattggtggtttatttttcacaagctatcatattttgatagtttcggttccccatcacctctaaaaaacctttggtctctggcgattgaagaacaattttatatcatatggccgatgttcttagttgttggaatgtacataatgaaaagccacgccagattggctgcggtgatatcattgcttgcgctttgttcagccgtgatgatgagcgtactgtatgaacctggcggagatccgagccgcgtttactatggcacagacactcgttcgtttgaacttctcatcggatgtgccttggctttggtatggccgatgaaaaggctgtcttccaacaggctgccaagcaaactgaagcacactttgcacgccactgaattttcggcattttgtattttagtgttatgtgtctatttctcagatgaatacgagccttttctttacagaggcggaatgctattcattagcgtgactgccgcaatccttattgcatgtgtttgccatccgagcagctttttaggcaatctgctttcatggaggccgcttcggtggcttggaacgaggtcttacggaatttatctttggcactaccctgttattgtgttaagcacgccagttcaagaaatcggaaaccctgttttttggcatatcgtgctaaaggtcattgtgacatgtatacttgccgagctttcctatcattttattgagaagccgatacggacacagggatttaggtcatttttccgccgtgtttttatacatagaatcatagaatggaaaacgacatctgtcatcagcaaactgtcaattggtttcgtcattttcgctatacttatttttgcaggagggctgtctgggttagccggagagcaaaagcaccctaccaaatggacctatagctcacaagaaacaaatgctgactccagccaggcttctggggataaaaagaacgctgcagcagataaaaaacactatcctgaacaaaagacaacagaatccgatcaacgtcaaaaggaaaacaaagatagtgggcaagagactcataaaaagaaagacacgcaatctcaacagacgaaaaaaccagcagacactgcgaaagaggtgttagctataggagattccgtcatgcttgatatttcttcacacctgcgtcagtcattttcaaatgtgacgattgatggaaaggtaggaagacaaatgtctcaagctttggaactcgcaagggagtacaagtcttttaatcagccgaacaaggctgtcatcattgagcttggaaccaatggctactttacaaacagccaaatcgaacaactgcttcaatctttctcaaaagcccatatctatcttgtcaatacacgggttccccgccaatgggaaagcaaggttaatgaatctttacagcaccaggcaagcgcacatcaaaatgttacgttagttgactggcatacagaagcccttcagcatccggaatattttacccctgatggtgttcacttggttcctaaaggggcaaaagctttgactgctcttattgttcaggcgatgaaatcgtaaaaaagagatcctatacggatcacttttttactttagtttctgatcgttgattatgtcttctttcagcaaggcagcccttatgtttacatgccgtttacgtaagggtaagccaaaattgaatggagggatgataatgaaaggaaatgaagaacatgacatccaaaaagagttgaaacgatatgagctttttttcaaaaaacgatataaggttctttatacattaaacgattttatcatcggtgctatgtttctcgttggaagttttttctttttctatgaccggttaatgtcggcagggatatggctgtttgcgatcggaagtttgctactgttaatcaggccgaccattcggctgattcatgactttcattaccgtaagcatgtggaacagcaattcaagcatcaatcttcaacagatgactgatcttaaggaataagaaagaacaaaatgccaaaagcctgagttgaaaatcaaaaacaagactttcagactatttatttttgaaaataaggtaaaaagaactaaacttttgcctctgcatgccgatatgaataataaggccggcgcgatactccctataacatccttttcagtagatttcattatcgtgccggttttctcatatgcaaagcaatcccgccaatcagattggcgggattttatattttacattcctgtccaaacgtcttttacataacgtttttgatcttgcagcttttgcagccattcagctgattcttcctgacttgctcctttttcagcttcatacgccaatcgcaaagttttctctacatcaggagccatttgcgatccatcaccgcatacgtaaatatgagcccctttttcaatgagtgtcatcaatttctgcgtatcttgcttgagcaagtgctggacatatccttttggttcgttttcgacgcgcgagtagcatcggcggattgtgaccaaaccgtcctgttccgcttgatccagctcttctctgtaaaggtcgtcatggtccgggcgacggcagccgaagtataaaagtgcttcaccaagggtgcttccttccttcttcaaaaccgatcttgcctgaataaagcccctgaatggcgcaattcctgtgcccggcccgaccataatcataggcgtttcaggctcatccggcatctggaatccggactgcggggtacgaatgaaacaggctgctgcatcatctgtattcaattctgctaaataattagaggcgacaccccggtattcacctcggccgctccatgctgaggctttcacaactcctaccgtcatgctcacgatatttgcatgaactttcggtgagcttgaaatggaatagtatctcggttttagtgatggcaaaagtgctaaaaaccgttcaaacggcatttcgcaagcaggataatcctctaaaaaatcaagcatggtaagacgtcttgcaagtacctgctctttgtaaatgccatcatctaaaacgagctgttccagctctttttgatgcggcggacagactgtataagaggccagctcccgaagctgaagccttgatgccggttcctgcagctctacataggacgacaataaatccgcaactttgatcggccgatccatcggcagatgagacatatgagcgcttccgcttacttttatcacatgattggactgcaaaccgaatcggctgagaacccgctgaacaagctccctgctgttcttcggcaggattccgatatgatcgccttctttatatgttttaccagccggaatttccaattcaatatggcgggttgaacgcgtgctgtcagctgtctggagttctcgattctctaacacaatcccttcaaaggcgccatatgctttagcaaccggcgtttccgtcgcttcactgagaaaagtaatcgataatgaaggcctgtcttctttctgggctatttcgttaatgtcaaatgcgtccattgtttccttccagaagcggttttcccaagactcgcggtggctttcaaaatcatcggcggcgtcaccttccccaatctctgttaaacgcgatgccccctttgctttcatcatgtcatcaatcaggcggggaatccgctgatacgtgctggcccagctccggtttccgcagccgaataccgcataggaaacacctttcaattggccttcctcaagctctttcagccactctacaaagccggcagcattatcaggcggcgccccattataagaagccgttacaatgacgactgcccctccttcagggagcttgccgatataatcatcaagcggagccgtttcagctgtaaagcccatctggcggccttgagcagccagttcaccggctattccctcagctgtcccaagatttgaaccaaaaagaacaagtaaaggtgtgccgtgtttaggtttggtttcttttggctttgtttctgctttgatgtctgcctgttcttttctctgtacattgattgccgctgttttccgcggtttcacagtaattttaaaatcatccggcttgatcgttaatgcttctttgatttttagttcgtagccagtatggtttatcaattcaaaatgctttaatacaagaccgagaaccattgtcgcttcttgaagagcaaactgcatgccaatacaagcgcgctgtccgtttccaaacggcttatacgcatggtgagggatacttgaaggatcctcaaaccgttccggacggaaatcttccgcatccggtccccaagcgttttgatcccggtgcagttttggaattaaaacagtgactggctgccctttgctgatcggatattccccgcctagaacagtatcctccttcgcatatagagaaaaagccggagctgttggatacagtctgagggtttcatttaaaaccatccgaatgtatttgagctgctggatttgtttatattcaggcgtgtcatccgttaacacgcgatccgcttcctcctgagcttttttcagtttttccggatgtgtaagcagacaataaatcgcaaaggaaagcaaaccgcttgtcgtctcatgtccagcaattaaaaatgtgatgatttgataccttatgttttcatcatccagcgtttcacccgttactggatctttggcataaagcatgagagacaagagatccttgatgttatcatccggattcgcctttcgctccgctatcattctatcgaccagggagttcatgacttctatatccttttgaaactgcagcttcgttttcaccatcatcttatcttgcaggcccagtctttttgattgattcatcgcctcttttaaggcacggagcatactggtgataaacggatgctgtgaatcacggtaaaagctgttgaatcgatagttaaatccgcataacccaatcgtatcaagcgtcagacgtgtcatatcgtctgctacatcaatttcttcattagggtttaaccggctccatttttgaatcagctgggttgcgatatccagcatcatagaatgatagcctttcatcgctttttgactaaaactcggcagcaaaatgcggtgggctttttgccagttcggttcgtgcgtccagcttgtaaataagccatctcccccgaattcgcgcaccttttgcaagcctttgccaaggttcttgtcaaagcggctttcatcacacacttcagccacaagattgtgacccgatacaaaaacactggatactcccggaaaatcaaaacggaaaatcggccccaattcatcagctatccgccataaggattgagaaagctgttctttttcaagatgcggaagattttttaaaggtccgtatgttttgggctgaggtattgcgcttgcctgtttcattaacatctccctttcctatttttgtgatgaatgaagcttaatggcgtcccagcagcattgttccaattcagtaattaaatcagtgtccatctctatatcacctgtttgaacgagctgatatatcttgagaaacgcccctaatacaatcgcaattaacacattagagggcaggctgcgaatcacgccttccgcttttcccttattaaaatagtcatcaagcatttgagtcagattttctatcatttttttgcttgtatgatttaagtaatgagcgtcttttttggtttcaagaaaaaaaagcgcatagtcgctctctttcgtaaactgaacgagacagcaaaatacgtggtgaaagccttctctgacaggcaattctgaaacgtcttgcttcagtttttccgtaaatcgctggatgctttcttgaaacagtacgttaacgagtgtttctttgctgtcaaaataacgatagatcgttcctgtccctacatgagcacgttcagctatcataggaatagtggtagcgtcaaaacccctttccgtaaaaagtgagactgacgctttcataatcatgtcgtatttactgctggatgcggatatcatgtaatctgacaacctccgattcgtttacggaatgaatattcattccttttgttcacaaagaatgtctgccctgtctgatatcacctctttgttctttcttctgttataagtttatatgaaaaaaactttttttaatataaagtatatgcaaaaaataaaaaattaagaaaatatacccaaatcctaatacaaggatcttggatatatttcccgagaaattttttatttaacagccacaatacatagacaggaagcacgcctgataacagaaagatccctgaaatgctggtctttcagcagttgaatatacgttttctctttttcaccggtatttgtgtcaatactgatataaaaccggccgtcaatttgaagcaccctgtaaatttctcttaatgcaagcctaatatcggtgcagctttgaaccgtatgtaaagaaaagactttattaaaggtacggtcatcaaagggaatgtcctctggatagccatgaaaaacctccccgttccccatgttctttcgattcgcacgtgatatctgtcttacctttcgctttgaaggatcaatgctttttaggcttcccttttctagtttcttggttatgcttttaaagacagtgccatttccaattccaatttctaaaattctgtcatttccttgtatatctatagagtcaatcatcatatgctcaattgttttggttagcttatatttccgagaaaataatttccaaaaattcgatcgtttatagagtctattttctagcattttaaacacctgcttttggtttcctatgtttatttattatattcaaaaaataaacatcatcttcattctaaaagtgaaggaaggtaccaactagacggcaatgtattgaaaaatgtttcaatagaactaaactttttcatttttttccgcaaaaaaagcagaaaacaaaatgttttctgccctctttctaatgccaatgataagggaatacatacagcctttgctgctgcattgccatcagcctctgctgtcggaatggatttccataaccatgtttgaaggaatgcggcatggacgcataaccatggccaatcgacggcagccttttttgataatcgttcatcatgccatcacctgcctcacagtaacgttgatttattgtatgcaggcaggcattttcttgacagtcatatcgctaaacttggtccttctccattgtataatgcatcaataattccattctaagcatatgccattcccccttcagtttttttcgttgcttttagcgccagtttgttaaataaagatgctttaactgagactctttcatttcatcataaatctgctcaatctgctgttctcgttcgaattcttccaggcttttaaaccgtttttttatcgttaacgttaaaaagaataggttaatcgtcatatcgctcaccccctttcaaagtccgcatcaagcgaaataacccgcggcacaccccttctgccgcgggcaaataaaaaccgcagacaaaagaagacaccaatgcctctactgcctgcggggagttgcgtatgtccgactattccgaatttaatgcgtgcgataagcatcggttaaggaaggacacgaactcttccacaggctgaataaaccatgaacttttacatgtgtatcacgtacaggttgacgtcgttgtctcattgtcattttggttcagcctcctttgctttttttcttactttgtaagtatatccaccaaattccattttgtaaacatctttttctaaaaatggacggaaattgtgcaaatcatcgaatggatttgcccgttggtcatgacacctgcttcatttcttttctggagcggtctttcttatgatatgcaataaaataaatgagaccgacaaatacagctccgccgatgacattaccgataaaagccggaatgatgtttccgatgaactgcccccacgtgaatgagcctgcaaaaatggcagcaggaatcacaaacatgttggcgacaacgtgctgaaatccgatagccacaaaagccatgattgggaaccagatgccaaggatttttcctgctgcgtcttgggcgccgaaagaaagccacactgcaagacatacaagccagttacagccgatggcggaaatgagaaccttgccaaagctcatatcaagctttccttgggcaacggcaatcgttttttctaaataaggacctgtttcagtcaatccaaccaaatgcccgaaaaagtacgcaacaaacaatgcgccgattaagttcataattgtgacgattccccagttaatcgctaactcttttactgatatttttctcgaaaataacgccattgcaactgacatcatattgcctgtgatcagttcagcgccagcgagtacgacaaggatcaggccgactggaaatactgctgcaccaatcaaactggacaggctcccccattctttcggaagatcgccgattaccctgatatcaagcaaatacccaagcgcgataaatgcaccgcctaaaaaccccagcacgagcagtgacggcagcgggagctttatttttttcatccctgcttcaattgctgcttccgctatttcatccggttttcgaaaagccataataaaacgcctccattacttcttcttttctcacagttatgcaagaaaggcaataaaaaaggcagcactcaaataacctgtgtcaaaccaggcgtttgaatgctgcctaacttgtatgcatacccatacaacaatatcaagcagtatgaagatattgaaagagaatatatacagttcgtgcatacattccattgctttagccttctataactgtagcaacatcatatcaaatgtgacaaatttgtgtcaatgacaaatatactagctttgcagaacttctttttgctcatctatttttcggtcaaaaacaaatacagatacagcgatgttttcctcaattttaatatcagaaaacaaatggactagcttagctcccatgagttcctccattccttccggtgtttgtttggaataaaggtcttgaattaggcttgtccgggccgcatgtaccatctctcttccttcaggcgtgcgggcgataaactgctcgcttgcactcagatttccatatagtgttgaaactgccatgttttctacaaatacagtatgaattctctcaggcccttttccgaacaattctttgcgaagttttcgaataatatcattgaattcatgaatttttttagacatgctgattaccccttccgatattgccttataaaggcttttcccggttcccctcaggacatttcacttggttaaaattttcctgccatattgtattataataaatatcacattataataaaagcagtgttgatggatttgtaataggatcttgttatgagtctatcgttttataaaaatcaaggattggtctgttagtaagacttgctagtgaactattccgccatgtgtgtttacaccttcttagaattaagggcaggtgtatctctatacatggctttttttgacttcttgaaagaaagatggaggggaatatgaatatgatggacgttaagtcgatcagtgtccgtgtagacggaacagaaattcaagcacgagcaggggccacaattttagatattttaaatgaaaacggaattgagtacccgcagatttgccacgtaccagaggttgacccgattcaaacttgtgatacttgcatagtagaggcaaacggcaagctggttcgttcatgcgcgaccgttgcagaaaacgggatgtctattgatctttcaggaaatcgagtgaaagaagcgcaaaccgaagcgatggaccgccttcttgaaaatcatttgctgtattgtacagtttgcgataacaacaatggaaactgtacgctgcataatacagcggaaatgatggggatcgagcatcaaaaatacccatacacgccaaaagaagatccttcttgcgcggttgatatgtctcatcctttttaccgctatgatccaaaccaatgtattgcctgcggccagtgtgttgaggtctgtcaaaaccttcaggtaaatgaaacactctcaatcgactgggagcgcgaacgccctcgcgtcatttgggatgagggagttccgatcaatgaatcttcctgtgtcagctgcggtcagtgtgtcacagtatgtccatgtaatgcactgatggaaaaatcaatgctcgggcaggctggttttatgacaggcattaaagaggacgtcatggaaccgatgattgatctcgtgaaaaatgttgaaccggggtatggcagcatttttgccatttctgaagtcgaagcggcaatgcgtgaaacgagaacgaaaaaaacgaaaactgtatgtacgttctgcggtgtcggatgttcatttgaagtatggacaaaaggacgggatattttaaagatccagcctgtttctgatgctccggttaacgcgatttccacatgtgtcaaagggaaattcggctgggattttgtcaattctgaggagcggatcacaaagcctttaatccgtaaaaacggagcctttgtggagtcttcttgggcagaagccctcgatcttgtcgcaagcagattaggatcaattaaagagcagtacggtaaaggctctgtcgggtttatttcttcttctaaaattacgaatgaagaaaactacgtcattcaaaaactagcgcgtcaggtatttgaaacaaacaacgtcgataactgctcacgctactgccagtctcctgctacagacggattgttccgcactgtcggcatgggcggtgacgccggcacgattaaagatattgccaaagcaggcctcgtcatcattgtcggtgccaatccggcggaaggacacccagtgctcgcaacacgcgtcaaacgggcacacaagctccacggtcaaaaactgattgttgctgacctgcgtaaaaatgagatggctgagcgatctgatctgttcatcagccctaaacaaggcacagaccaagtttggctgatggctgttacgaaatatatgatcgaccaaggctggcacgatcaggcgtttattgatgagaacgtcaattactttgaagattataaagaaacccttaaaacgtatacgcttgattatgcagaacgcatcacaggcctttcaaaagaaaacatcattcaaattgctgaaatgattcgtgatgctgacggcacttgtgtcctttggggaatgggtgtcacacaaaatacaggcggttctgatacatcagcagccatttcaaacctgcttctcgctacgggcaactatcgccgtccaggtgccggcgcttatcctctgcgcggacacaataacgtgcaaggcgcatgtgatatgggaacattgcctggctggctgccgggatatcagcatattacagatgacaaggcccgcgctaaatttgaagaggcatatggtgtcgagattgatggaaagcctggtttagataatattcaaatgcttcatgccattgaagaaggaaaaatgaaagctatgtatcttgtcggtgaggatatggcactggtcgattcaaacgcgaaccatgtgcatgatattttatcaagccttgatttcttcgtggtacaggacatctttctgtcaagaacagctcaatatgctgatgtcgtcttgccggccactccttcacttgaaaaagacggaacatttaccaacacagaacgccgtgtgcagcgattgtatcaggcgcttccgacgcttggtgacgcaaaaccggactggtggattattcaagaggtggcaaaccgtttaggagcgaattggaattacagccatccaagtgacattttctctgaaatggcgagtctttctcctctgtttgccaaagcaagctatgaggtgcttgaaggctggaacagcttcctatggggcagcttcacaggtgaaagcacaccgcttctgtatgaagacggatttaatttccctgacaaaaaagcccgctttgccctttctgattggaccgagccagcggcatttccggaggaatatgaccttcatatcaataacggccggatgctggagcatttccacgaaggaaacatgacaaataaatcgaaaggcatccaagcgaaagtgccgaatgtattcgttgagatctcacctgagcttgcacaagagcgaggtgtttgtgacggttcgcttgtacggctcgtttctccgttcggagcagtcaaattgaacgcgctgatcacagaccgggtacggaaaaatgaactctatctgccaatgaactcgacagacaaggagtcagcgattaacttcttgacgggccctgcagctgataaacggacgaacacgcctgcttataaacagacaaaggtccgcatggaagtgcttggcggctgtgaaacagcgccgcttccaaaaacaaatccgcgcaacaaaaaacggcatccgcaaaacggagtcgaagcagaaagaaaatggaaccgccctggctatgtacatctgactgattaaacgataggaggaaaacgaatggccactccgattacgacgatcaaaaaagaaacaaaaacagctgagcaaatgaagcttgaaaaaatagaagaactgaaagagctgctggcggaaaatgaggacgccgtctctaaaacgatgacgttaatgaatgaactcaatgatcttggaatttttgatgcggcaacaagcatgctcagagcgaaggaagacattgccaagattgcgcttggccaagtttcccgcgagcctgtcaccaacctcatcaacacgatgatggccgccggaggcgcattgacaaaagccgatcctgagtttacagcaaagcttttagaaagcgtaatggctgggactgaacaggcacaaagctttttaaaagaagacaagaaagtcgggattctcgacctgttaaaagcaatgaacgatcctgatatcaacagagccgtcggcttcggccttcagtttttaaaaggcatgggaaaagaacttcgagaacaataacagaaaaacagccatcgctgatgatggctgtttttttattcgtcggcttcttccaaacgcttcttgtaaataagtgaacggtcagcgcaaaagaaggcaccggctaaaaatacgcaatccgctaaaaacatcgtcgatttctggcctaatgttaaaccttgatcagggagaactgcgcctatatataaaaaagtgctgactgcaagcaatgtaaaagcaaaatgcttgtagtcttcttttaaagatttcattctatttttgttcaaaagaatcacctgccagattcatagtatacgactattataatataatccggcggcttacagagaaagtaattctatccatttgttatatattttcaagcgcttggccgatatcttccaacaagtcttccgcatcttcaattcctacagaaattctgatcaagccgtccgtaatgccgagctcaagccggcgttctctcggaatagaggcatgtgtcattcttgcaggaacagaaattaagctttcaaccgcccccaggctttcagcaatggtaaacagtttcagatttcctaaaaacgcatcaacccgttcttcactgccaatatcaaaggagatcatgccgccgaagcccgctccttgcgtttttgcaagctcatgtccgggatgatttgaagaaccagggtaatataacgtttggacagcagggtgattctcaagaaagcttgcgattttccgcgcattttgatcgatcgcttccattctgagtcccaacgttttgattcctctcattaacagccaggaatcttgagggccgagcacgccgcctgtggagttttgcacaaaatgcagctcttctccaagctctttcgaagctgtcacaactaaacctccgacgacatcactgtgtccgccaagatattttgtcgcactgtgcagtacgatatcagcgcctaaagtaagcggctgttgaaaataaggagtattaaaggtattgtctacgataagcagaacacccgctttttttgcgatatcagccatgagcgtcaggtcggtgattttgagcaacgggtttgtcggtgtttcaatataaattgcttttgtattagggcgaatcgctttttcaacttcttccctgctgctcgtatcaacaaatgttgattcaatgccaagacggttaagcacctttgtcatcacgcgatatgttccgccgtacacatcatcagtcaacacgacatgatctccgctgttaaacagcatcataaccgctgtaatggcagccattcctgagctgaacgcatagcctgcttccccgctttccagttctgtcacaagtgcttcgagagcggttcgagtcggattggccgttcttgaatactcgtagcctgtatgctgccctgctttcggctgcttgtacgtgcttacttgataaatcggcacggaaactgcgcctgttttctcatcacctgtgattccgccatgtatcatcaatgtttttttcttcatatcagatgcctccttcgtatatttgtttgctgatatatcgatcgctgctgtcaggaaatactgtgacaatgttagttccagcggatgcttttttcgcttcctccaatgccgcataaagcgctgcacctgaagagcttccgatcagcaggccttctttttctgccgcttctttcacaagtctaaacgcattctcatctgttacggtgtagatctcgtcaaaatggctcttatccatataatcggggataaactccatgccgatgccctctgttttatgagcgtggggctctcctccgtttaaaatcgagcccaccggttcaacaatcaccgttttgactgctggatttttttcttttaagaaggaagctgtccctgcgaatgtgcctcctgatcctgcccctgcgacaaatgtatgaatattcccatcaagcgcttcccacatttcaggcccaagcgtcttatagtaagtcgatggatttactcggtttttaaattgcaaaacgcaataagaattttcaatttcagtctccagctgaatggctttttgaatggcgccctgcattccgtcttgacgcggtgtatgaatgattgatgcgccaagcgcttgcataatttgctgtttctctctgctgaaatgttcagggacacagaaaatcgctttcagcccatattttctggcactcagcgcaaggccgatccctgtattgcctgccgtagcttctataatcactccgccgggtttcactttgcctgaatcgagcgcgtcacgaatcagcatatctcccagtctgtctttgatgcttccccctggattcatcatttcaagcttggcatacaccgccactccttctggaacatcaaagttcttcaagcggagaagcggtgtattcccaatcagctcggtaatgtccgtaatcactgtcatatatgtcctcctccttattagagggtgtttttagaaaaaacggaggagaacattctccccgttttaatgaattcgtttgatcacctttaacacaagctctgttgaatggacagccgcctgctctaaaaattggtcaaatgaaacatgtgattcttttcctgcaatatcagataacgctctgatgacgacaaacggcgttttaaattgatggcacacttgagccactgccgcagcctccatttcaaccgcatacaaatcagaaaatctcgtacgcacctcttcaacccgcttcggatcgttcatgaaagaatcgcctgttgcaatcgttccttttgcaacctgaatgccgtcgagttcagataccgcttcttcagtgatgctgatcagcttttcatccgccgcataagcagccggaagacccggcacttggccgtattcatagtcaaaagccgttacgtctacatcatggtggcgaacgtcagtggaaatgacgacatctcctacattcaatgtatgatgaaatccgccggctgagcctgtgttaataacataatcaggcttgtaacggtcaagcagaagcgtcgtgctgatagcagcatttacttttccaattcctgattttaaaagaaccacttcagttccttcatattcgcctgttgtaaattcacagtgtgcgatcgtttctgtttttgcattttcaagtttgtttcttaagatggtaacttcctcttccattgctccgatgactgctagtctcatctattcacattcccttcactttaccgtttgatcgcctccattatccacacgaagtcgttttgctgagtgaatcggactgcaaaaccttcagctgtaaacatttctttcaacgcatccaatgtaggataatgctctgtctctaaatcatttgcaagctgataaaagccttgagaacgggctttatcgatagcctgttgatacgcttgcgcatcttcaaagacggtatcggcaaacactattttatcatgcaagtgaaggtatttgccatattgctttatggcagcccgcttttcttcgtcagtcaaatgatgaaaagcatatgaactgacaattgtatcagcctgaaatggcggctcagggaatgtcaggaagtctccatcaacgatttccgacctgcctgaaagcttgtcagaagccagtttacgcattgctggagaaggttcgattccaaatacagttttgcctgcatcgagcagcttagccgtcaaattccctgtccccgggccaaattctaacacatgcgttccagatttgctgacgatggcatcaaggatatgatcatagcctctgaacgcttctttatactgaatatctaaaccttgtactgtttgatcataagttgctgcccaatcttcaaagagagggataaattcacgtcccatatttgtcacactccatatttaataattcctataagcatactatgaattaatgatggaacagttcctataataccacatcttctgaaaagcaggtactaaaacactttgtgtattttatgccatctcatattgcgcattgaccgcaaaaaagcttatacttcaaatgacttgtgaaagctggagggtcaagatatgaattttcaattagatctgattaaagacaaagtggaattttttgaagcggcttcattgcaggagcttgaaaagaaaatcaatacacaaattgaaaacaataaagccatcatgctccgggtgaaatctgtttcacaccaaactgctgtggcagaaggaagaatattgtacagcgcggtggttcatttcgcagctgaagcctaaaacaaaagcagccggttctaacccggctgcttttgtttattttagcttttctacttttgtcggcttccagccttttttatcaacccatgtaatcgtgacttgatatttattcccagtcgccttgtccaaaatcttgcctttagcatcctgagggctgccgttatttccaagccagagcaccgtcatgttatctgttgagacaccagttgcgtatgaaatggctttcagcatctcagcccagtcttgtgagcttgaatcataagtagcggcatgctcgccagcctgctcagttccgactgctttccagtcaggattttcatacgttttttccacatcgctcgatgagccgccttctgttacttttgcatctttaagcccgtcaccggctgaatctgagcttgaatctgaatcagagtcatcttttttagaagaagaatcatcttttttggaatcagagtcagaagacttctcagaatccttttcgctgtcagatgtatctttcttgctgtcttttatatcctcatccgatttcttttcagtctttcctgaagccggagattcctgtttttgcgccgtttcagaatccttgctgacatctttgctagaaggactgttaatgaagagattcgctgctactacgacaattagtatggatacgattgcgattaaaatgttaagcactaaattggcttttctgcgtttatcacgattttcataacgagattgattattgctcaataattctgcactcctttatccctcttggctcagcatatattttaacatgtgctgagaagttgttctatttctgattgatttcaatttcgtgtacttttttaacaatatcataaaacaccgaatttgtcagagccttatctcccggtgtatccatgtgtaaaacaaccagagcgtatttcggcttatccgcgggaaaatatccggcaaaccatttttcatagagcgtttccctctcttttgaaagcttgcctgtttgggctgtgcccgacttccctgctacagtatacggaagatcttgaaaccttctgcccgttccggaaggagattctaccacccgccgcagtattttttgaagctgctgtgacgtatatttgtctatcgtttcccctttgagcttctgatctttaaacgtaacgagcgttgtgccgttcttatactcaatttgttcggcaattttcacctgccgtttttctccgccgcgggcgattgtcgccatcatattggctacctccagcggcgttacctttacgtttttctgcccgattgctgtttgcgcaatggcttttttgactgatttgtctttttcatccccccaaatcacgccgcttttttcgttatacagctggcggaaatcggtttcgtggtacagttttccctcccagcctgcccgatcagtgagagccagcttctcggacatatcttcaataaccgagctgtcttttttcattaattgttctgcaagactcgtaaatgtgtaattacagctttgggcaaaactttcatcaaaagacaaggttcctttgtcgtcccccggttccccgtacaggtttaaattgcaattaaaggtttgactaggcttcaccatattattttcgattgcagctgcggcaatgactgttttaaaaactgatccgggatagattggcgtcagcatataattttgaagtgtgttttgccgggacacatctgcatctggtttgcttacaatccccagaacactgctattttcgatgtccagcagcacagctcctccctttttcagcccctgttcatccaatacctcctccatcgctttttgaatgctttgatcgatcgttgttttgacctggagcggataaaatgtattggcttcagctgtatatttgacgtccatgccaaacaaagggtttccttttccgtccacatgatataaaagctttgtgtcttgttccggaagcaaaaactcgtcaaatgtccgttctaaaccggttgttccgatttctgttgtaatcggaaggctctccttgtcaggatatttcttgcgaagcagcgccggatcttggttcgtgctccctatcgtatgtgaagcaaggctgggcttgtcttcattctccatatatacgccgtaaatgccgggatatttcaaagaattgatttttgtgatagattgttttgaaagtgttttgattttcttttgctgcaaaatgaccggtttttttgcctgacctagtgtctggcgcaaatcatcttcagacatgccgaggatgtccgcaacttttttgatcggccaatcctgcgtcagcagaaaagggaacaaaacaaccgcaggctcgctttgtcctgtcagcgcccgcccgtttcgatctaaaaaagagcctcttccatctgaaatgagcacttcctccgtccgctgtttcacactttcttgaatcaaattaattttctttttagaaaatgattctgtgaaaaacagctggatttctgcaagtctcagcagaagcagaaaaaatacaatcaaaaaagcgatgactgccagcttcattcgtttcgatatcttcataaaaaaaacacctcacccacattgtggacgaggtgtttcgctgctaaacagatattatgaaattttcacaattttcacgagcatttctccgcccggtgtttgtactgtgacttcttcatctacttttttgcccaagaggctttttgcgatcggtgaatcgtttgagattttcccttcaaacgggtcagcttccgcgcttccgacgatcgtatatgattcttcatcaccgtcaggcagttcgacgaaagtgacggttttacccaaaccgacaacgttagagccgccgtcatcttcaatgattttcgcattgcgaatcatattttcaagagtcgtcacgcggccctctacaaatgcctgctcttctttcgctgaatcgtattcagagttctcggaaaggtctccgaagcttctcgcaattttgattcgctctactacttcttttcgtttaaccgttttcaaatattctaattcttgttcaagtttttgttttccttctgcagtcataggaaaaactttctcttgtgccatgtcccttcactccttctggttgtccctcaacatcttcgattatgtatgagagcataaactaaaaaatacaagaatgagaacacagggcagtcctcgttcttctctcccatataggtactgtttatcttaaactgaatcgtgtcgttctgcaaatatttcgcgtttataaacagggaaagaagggaattcgcacattcccttcctgcctatacataatatggtcagagttatttatgtctatgctatggtattacaaaatcgcgttttgttcaagaatggtttgaatttttgtgaccatcagatcaattgcgacgtgattctgaccgccttccgggataataatatcagcgtatcgtttcgtcggctcgacgaattggttatgcatcggacggaccactgacacatattgttcaatgacagaatcaatagagcgtccgcgctcattaatatctctcataatccgtctgatgatacgcaagtcagcgtccgtatcaacataaagcttgatatccatcagatcacgaagccttttgtcttcaagaacaagaatgccttcaaggataataacatcctttggctctacgtgaaccgtttcttctgaacgtgtgtgaagcttatagtcataaatcggcttttcaatcgggcggtaattcaatagatcttgaatatgctcgattaaatagtcattatcaaacgcaagcggatgatcatagtttgtgttcagcctttcttcaaacggaagatggctttggtctttataataaaggtcctgctggatcattaaaattgagtgtcctttaaactgttcataaatggaccgtgtgacactcgtttttcctgaaccggaacctcctgcgattccaatgactactggattcttacccatgggctgttacttcccctttctcatcatgttgctcggataaatctttttgtctagtttgaatttgacaatttgcaggggatggcgggcagcatctagctcatttccgtcttcgtcccaaatggtttcaatcgtatgtgtaaagttttcgatttctggaccgaaaaattccacttcgtcgccttttttgaagaaattgcgctgctgaagcgtgaccatttgtgtatcttcatcataattcagcactaagccgacaaaatcatatgtcgttttcttggcgtgttcgccgaacatttgctcttcatagcctggcgttccttcaaagaaagctgtcgcagtgtccctgttggcgcacttatcaagctcttcaagccattctttttgaatcacaaagttttctggatcagcgcaataagcatcgattactttgcggtatacgctgacaacagttgctacatagtgaatggatttcatgcggccttcaatctttaagctgtcgatccccatttcaatcatttttggaatggattcaatcagcttcaaatctttcgggctcatcgcaaatggtgcatcttcttcaccatacaaagcaacggcgttggcaccgtctgtttggtagagatcataatcccagcggcatgactggcagcagcctccgcggttggaatcccgcgctgtcatgtgattgctcagcacgcagcggccggaatatgcaatacacattgcgccatgaatgaaggattcgatttcgatatctaccttttctttcatttctctgatttcaagagcgctagtttcacgtgccagcacgacgcggtcgagaccttcttccttccagaactggacagccttccagtttgaaagagactgctgtgtgctcaagtgaacctcaacattcggcgccactctgcggcatgtttcaataataagcggatctgccacaataataccggcaacgttggcgtctccaagcgcttttaaatagtcttcaagcccgtccatgttttcattatgagcgaaaatattcgttgttacgtagatcttcgcgccatatttctttgcgaattcaacgccttctgcaatttcttcgatcgtaaagttatcggcattcgagcgaagcccgtattcctgtcccccgataaagaccgcgtccgctccgtaatgaacagcgattttcagcttttcaagattacccgcaggtgcgagaagctccggctttttcgtaatcacacgctttccattaacgattgtggatattttatcatttacggcagtcatagcttaacctccttttgattaataaaccgtttccttgaagaagaatccggtatcaatttttctgtttactggctggatgctttcaatgcgttcgatccagtcttcttttttcgcttcgtattcgtcacggttttccacgcacaaatcaattgcttctctgtacattttggtgacttctattaggtattcaggcattttcaaaacaccatcgattttgaaagaatcaattccggcatctatcaattcctcgagctcatcaatgatgcacacatcgttcgggctcatgatgtgagtgccgttttcatcttcgaaaatcggatatttattatcgcgttctttatcgtgtaaaaacatgcctgattcttttttctttctttcaatgtccatgactttgccctgatattcaaaatagtttccaatcaaagaacgcttcgattggaacatgcacgtcattccatgcacctggatttcaatttcgacttcagcattttctttaatctcaacaatgctgtccatgtttaattctctggcaagcacagaacgcgccgcacccttgcgtccccagtagttgcatgtataatagttggtgcctgtcgtttctgtgctccaatgaagcttcagatcaggcgcagattcacgggcagccatcagcacggcaggatcgccgaataccgctgcatcgacaccggcttctgctaagaaagccagatattcgccaagctcacccactttatcattatggaaaattgcatttacagcaacgtatacttttgccccttctttgtgagcaatctctacggcttttgttacatcttcacgagaaaattctccggctaatctcaagccgtatctctgttccccaactaaaaacgcagttgccccagcctgtatgagcggcaaaatgtccgctgtactcgtcggcgtcactaagagctctggttttttcatgacgttcacctcttctttttactaatcgcaagtccgtccccgacaggaataatcgcagtttgataatccggatgattcatcagccaatgattatattcatcaattttggctacaagcctgcgccttctcttcggttctattttgctgtaatcctctgccaccagacctttaaacagcacgttgtctgttataatcaccccgtccggtgaaagcatcggttcatataaatgaaaaaagttttgatactgaccttttgcagcgtcaataaaaatgacatcgtaaggcgcggttacatgaacggcgtcggctaattcaagcgcatctccgtaaaaaacatgaatccggtcatcaagctgaaattccttgatattgtttaccgcttcttcatgccgtttctcattgcgttcaattgtatatatttcagcagacggcagttccagagccattcgaatggctgaataaccaatggccgttccgatttctagtatttttttcggctgtttcacagacaaaatttgaagcagcacctccatgcccgctttttccataatcgggacatgatgttcttctgcatatgcttcaagtctcttcacgttatccggccgaggctttaataatgcttctatatagtcatttatttgttcataccggtcagtcactacaaacagcctcccgttctaaaaaggagtgccccagtcttatgcgcaggacactctctgaatacatcatgatacatcggtaaacaacccgatatattttatcataaaaccttgcggaaagcgaacaaaaggagagctttttgctctccttttatttctcattttttgaggaaatgtatttttcttttgctttattatgctcttttagcgtttttgtaaatacgacctcaccatttgatttggccaagaaatacagatagtccgttttatccggatgcagcgctgcttcccatgatgacatgccggcattggcaatcggccctggcgtcagccctgtgtttttatacgtattgtatggtgaatcgatttccagatccttataaagaacccgatctttatgcttgcctgccgcgtacaggacggtcggatctgtttggagcggcattttctttttcaggcggttataaaagacgctcgcaattttatggcggtcggctttttcagtcgcttcttcttctatcaaagaagccattgtcagcagcttatgcacagaaactttgtttttcttcatttctgatttatatgtttccacataagaatttgtctgcttaatcattgccttgataatgtcttcaagtgatgtgtccggatcgttaaaagggtatgtagccgggaataggtacccttcaagcgggtgcttaatgtttttattgaaaacatcatttgtcacagtgtccgggaattctttcttcagctgattgataaatgtttcatcgtccagcttcgctatgacttgttttttagagtattttgtttcatcagcaatagcagccgcgatttgggtcagctgtgctccctcagtcactgtgatttgaaaagcgtaacctgtagccccgcttgtcagcttctgaataatggcatctaaatccatacctttattcagatggtagaatccggcctgaaacccggaagcacctttatatttcacatagtactgaaacgccttctcgctttttatgacatcatttttctttaatatcgatgcgatggctgaaacagacgaaccgctcggaatgttaatattaactgtcgttttactgtctttttcaacaggttcaagcaatgatttcccatataaaaatgccccgccaatgatgagaaacagcacaacaatggaagacagtatgattctttttttattaaaaaacgattttttttgctgattgatatacattaggtctcctcccatcagctcttatactacatgattcattgtatttcggcaatttattacaaaaagaggcctgcataaagcagaaaaaagccggagcagtatagctccggctttggtttggcgcgatgttttactcttcgtcttcgtccgctaagaatgtgtttagtgtttcttcgatcatatcccattcttcgtcagtttcaatcgggaatagctcaccgttttcaccgtcttcgtttggcgtgaagctggaagcaagaatttctacttcttcgtcatcttttgattcgattggatagtacaagacataagatttgccaaactcttcattttcaaatgtaaacagcacttcacaaagctgttcatttccttgatcgtcaacaattgtaatatttttttcgccgtgttccattttcttcacctctggctttaatttaagctgtcaagatatccttgtaaaatcataacagccgccattttatcaatgactttttttcgtttttgcctgctgacgtcagctgcaatcagcattttttcagccgccattgtggtaagacgctcgtcccacagcacaacaggaacattgtacgttgtttcaagcactttcgcaaatgtttggctggcttcgcctctcgggccgactgttccgttcatgttcttaggaaagccgagcacgattttatctatagtatagtcctttatcagttcagataaacgggataaaccataatcgccttctgcttcatttatctttatggtctcaatgccttgagcagtccagcccatttcatcgctcagagctacaccgagtgttttggttcctaaatcgagtcctaatattctcattctttatttacgcctctttatgctgttctaaataagactttaccaattcctcgattaattcgtctctttcaagtttgcgaattaaattgcgagcgtcacgatgcctaggaatataagcgggatcacctgacagcaagtatccgacaatctggttgattggattgtagcccttttcctgaagcgcgtcatacactgtaatcagcacctcatttacgttagtctcagcagaatcatcggagaaattaaatttcatcgttttatcaaacgagctcaccgttttgcacctctttcccaaattcgcaggcaaagttcagcctggggtcctaatcttaccatcattctacactacatgggcgaattataaaacggatttcacccaatcttctacagaagccaaagcttcttctaatttttccggctgtttaccgcctgcctgcgccatgtccggacggcctccgccgcctccgccgcaaacttccgcagcttgtttaaccagcatgccggcgtgaagtcctttctcaatgaggtcctttgtgactccggcagagatattaactttatcgttttgtaccgcaccaagcacgatcaccgcagagccaagctttgctttgagttcatcgaccatagtgcggagatgattcatgtcttttgcatttacttttgccgcaagcacgtttacgccgtcaacttcttttactttcgacaggattgctcctgcttccacgttgcctagttttgcaagaagagattcattttctctttgtgcatccttcagttcagcctgcagagccgcgacccgtttcggcacttctttgatatttgttttcagctcgtcagcggtctgcttcaatacagaaatctggctgttcatttcgacgtaagcgccttgtcccgttacagcttcaatccgtcttgtgcctgctccgattccggattcagaaacgattttaaacaagccgatttctgctgtatttctgacgtggcagccgccgcacagctctaagctgtaatctccaacttgaacgacacggacaatatcgccatatttttcgccgaacagtgccatcgcacccatttcttttgcttcagcgatcggtttcaaatcaatgctgaccgggatgctcgcccagatcttttcgtttacgattctttcaatttgttcgagctcttcttttgtcacttggccaaagtgcgagaagtcaaaacgaaggcggttttccgttacaagagagcccgcctgattgacatgagttccaagaacatcttttagagcctgatgcaataaatgcgttgccgtgtggtttttaatgacgccgcttctcatatggtcttcaacttcagccgtaacatgcaggcctttttgaacagtaccgctctccacaacaccttcatgcacatgctggccgttcggcgctttttgaacatctttaattcttacaactgcctgctcgcttcggagatagcctttgtcgccgatttggccgccgctttctgcatagaacggtgtttcatcaagaatgatttgaacgctttctccttcatgagcctcttcgattaattggccgtcctgaagaagcacaatgatattggcatcagctttggtttgagagtagccgacaaatgtgctttcaactgtcacgtcgcgcagtgcgccgccctgcacctgcatgctgccgacatcctggcgggcgtttcttgcccgttcacgctgctggttcatttcctcctcaaagccctcatggtcaaccgtcatgttctcgtcttctgcgtattcttcagtcaattcaaccgggaatccatacgtatcatacagtttaaacacatcagcacctgagataacgctgctgcccttgtctttttcttttttgatcatttctgacaggatcgcaagcccttcattaagggtctcatggaagcgttcttcctcggttttaatgacttttgcgatgaaatccgctttctctttcacttcaggatagaaatcagccatgatttctgcgacaaccggcactaaatcaaacatgaacggacgatggatgttgatcgttttggcataacgcacggcacggcgtaataagcgtcttaatacatagccgcggccttcatttgacggcagcgcaccgtcactgacagcaaaggcaaccgttctgatatggtcagcaatcactttaaacgcagtgtctttcacattgtctttgccatatgtttcaccagaaatcgattctgttgctttaatgatcggaacaaacaaatcggtgtcaaagtttgtcggaacattctggatgacagacaccattctttcaagacccatgcctgtatcaatatttttctttggaagcggtgtgtacgtgccgtcagggttatggttgaactctgagaacacaaggttccatacttccaggtaacggtcgttttccccgcctgggtaaagctccggatcttctggatcattaccgtatgcttcaccgcggtcgtaaaagatttccgtattcggtccgctcggcccttcaccgatatcccagaagttcccttccagacggataattctttcttcaggaataccgatttttttcgcccaaaactcatatgcctcttcatcttcaggatgaaccgtaacagagagaagctctttgtcgaagccaatccacttgtcgctcgttaaaaactcccaagcccatgtaatggcttcttctttgaaataatcgccgatggaaaagtttccgagcatttcaaagaaagtgtgatggcgcgcagttttacctacattttctatatcgtttgttctgatcgctttttgagcgtttacgattcttggattttccggcacgacacggccgtcaaaatattttttcagcgtcgcaacaccgctgttgatccaaagcagtgaaggatcctcatgaggcactaatgacgcgcttggctctaccgcatgtcctttttctttaaagaaatccaaaaacatttgacgcacttccgcagaagttaagtgtttcattgtatttcctcctctataaaaatcgaaattctcttcagtgacagcaaaaaagccctccccctatgcaaaccaacgtttacacagggacgagagctgtctcgcggtaccaccctgattacgggcattcatgcgcccgtcacctttaaccctgtaacgcaggataagcggcagtgattaactgcactcaggattagcttcctccgatcttctgataaagctcctttcagcttatggagcttctctctttaacagggcttcggcgtactcagatccgtcactcgagattcgtatgtattctacgagaaattatagacaagcggcacgccgatgtcaatgctccgtcctcatccgcaaaaaatggatcatcattacttttaaaacagccgtcgcaggaacagccagaatcatcccgacgatacccgcaagctcccctccggcaaggagtgcaagcatgataacgaccggatgcattttaaggcttctgccgacaatgaacggactgaggatatttccttccataaactgcagaataaacaccgtaatcaccacaacaagaaccgccttgactgagatcgtcatcgcaattaacaacgcaggaacagctccgatgaaagggccaaaatacgggatgacattcgttaccccagagataaggccaagtatcagcggatacggaagcccaaatacccagaacgaaatgcctgcaatcacgccaagaatcaagcagaccaaaagctggccgcggatataatcgccaagcgaatcatccacatcccgcaaaaaggcgctgccccgctttctccacgacttcggagtcaagtaccatactgtctttttcattaactcaatgtccttcaccatataaaacacgagaaaagggattgttgcagcaattaagaagtaatcaagcacattgcggatcccgctgatcgcaccctcgatcgttcccgcaaaaaacgcctccgtctggcggatcattttatctatacggtgatgcataccatcaggccagtcatccgtatggttatgcacatgaagaagaagcccgttatacgtttcggcaaacatgggtatattttctgacaaatccgtcagctgcacgattaaaacaggcacccctttatacaacgcccagccaatcccgccaaaaaaaagaacataaatgaccaagatgctcaaagtcctaggcaatcctttgccatgcagccattctgtgaccggaagcaataaataagatataaaaatagaaatgatcaagggaataaagatcgtttttatgacgagccaaaagggtgaccataacatatcaagcataaaaaagacatagactgttaacagaaccagcaaacaaatagccacccacaacaaaagctgcaccggtttttggagcatctgctttcacctcacctatatcttttgaggtttacaaggaattattctttatgtttctttagtcagtcagaagtcatggacattttttcacttttaattttcagaaaagtttgatcatttactttttggtcaaattttctgataggaggattgcgatgatcacatttcaaaatgtaaacaagcattacggagattttcacgtgttaaaacaaattaatcttcaaatcgaaaaaggtgaagtcgttgttatcatcggcccatccggttccggtaaaagcacattgctcagatgcatcaacagacttgagtcgatcaatgagggagtgcttacagtaaacggcaccgccattaacgacagaaaaactgatatcaatcaagtgcggcaaaatatcgggatggtgtttcagcactttcatttatatccgcataaaacagtgctgcagaacatcatgctggctccggtaaaagtgcttagacaatcacctgaacaagcaaaggaaacggcgcggtactatcttgaaaaagtcggcatcccagacaaggctgacgcctatccttcccagctttccggcgggcagcagcagcgtgttgccatcgcaagaggactggcgatgaagccggaggtcatgctgtttgacgagccgacatcagcacttgatcctgaaatgatcggtgaggtgctagatgtcatgaaaacactcgccaaagaaggcatgacaatggttgtcgtgacacacgaaatggggtttgccaaagaagttgccgaccggattgtcttcattgacgaaggaaaaattttagaagaagcagtgccggctgaattttacgcgaacccgaaggaagaacgggcccgcttattcttaagccgtattttaaatcattaaaacagaaatggggagcttgtatgaaaaagattttttctttagcattgatttctttattcgctgtcatcttgcttgccgcttgcggcagcaagggatcaaacggagaagcctcaaaggagagcaaaaaagatacgctagccgccattaaagacaatgacaaaattgtcttcggcgtaaaaacggacactcgactgttcggtcttaaaaatccaagctcaggtgagattgagggttttgatattgatattgctaaacaaatcgctaaagacattttaggtgatgagaaaaaagctcaatttaaagaggtcacctcaaaaacaaggattcctatgctgcaaaacggggatatcgacgccattgtcgccacaatgacgatcactgaagaacgaaaaaaggaagttgacttttctgatgtctatttcgaggccgggcaatcgcttctcgtgaaaaaaggcagcaaaatcaagagtgtcgagaatcttggcaaaggctcaaaagttcttgcagtaaaaggctccacctcctctcaaaacattcgtgaaaaggcgcctgaagcatctgttttagaatttgaaaactacgcagaagcctttacagcccttaaatcggggcaaggcgatgccctcaccacagataatgcgattttatatggaatggctgatgaaaataaaaattatcaattaacaggaaagccttttacagatgagccttacgggatcgccgtgaaaaaagggcaatctgctctcgcgaaagaaatcaacgcttcacttaaaaagatgaagtcggatggcagatacgatgaaatttataaaaaatggatcaaagaagacccagctgaataacaaccatcccgggatgagcaggcgatgctcatcccaatttgataaggagtgaataggcagatgaatgtgtcaattcttttcgataacttcagcatgtatatggacggtttttaccataccttgctcgcaagtgttatcgcgctggccggcagttttgtcctcggcgttgctgtagcggttatgagaataacagtctttaagccgctgcaatggctcgggaccgcatatgtagaattcatccgcaacatccctcttcttttaattacctttgttttctatttcggacttccaaacgcaggcctgaggcttgacggttttcaagcgggaacggttgctctcaccatttatacctctgcgtttatcgctgaagccatcagagcaggcatccagtctgtttcaaaagggcagatggaagcggcacgctcgtcaggctttacctacagccaagccatgctccatatcattttgccgcaggcaatcaaaatcgtcattccgcctttaggcaatcaatttttaaacttagtcaaaaactcttcgattcttggggttgtggccggattggatcttatgtaccaagccgatttagtttcgtcgagcacactcgttgtatttgatgtttatatttttgtggcgcttttttacttagtgctgacgattccgcttagcatcggtgttaactatctggaaaaacggctggaaaaaagctattgataaggagtgagttacattggatttcatcggtgcttattcacaggagcatttagcgtttttatgggatggctttctcgtcaccttgtacgttgctttcatctccatcattctgagctttttcttcggtttaatcgcaggcaccctgcgttatgcgaaagttcccgttctttctcaattgattgcagttctcgttgaaacgatcagaaacctccccttgctgttaattattttctttacgttttttgcccttccggaaattgggattaagcttgaaattacagctgctgcaattacagcactaacgatttttgaatccgctatgctatctgaaattatccgaagcggactgaaatcaattgacaaaggacaaattgaagcggcgcgctcctccgggctgagctatacacagaccctgttctttatcgttatgccgcaagcgcttcgccgcatggttccgcccatcgtaagccagtttatttctttattaaaagatacatcgctcgctgttgtgatcgccctgcctgaactgattcacaacgcgcaaattattaacggccaaagcgctgacggcagttattttttcccgatctttttacttgcggcccttatgtatttcgcagtcaactacagcctttcactcgcagcaagacgcctcgaggtccggcaaacatagaaaaggatactctttggagagtatcctttttgcattaaaacattttcgtaattcttcttctcatccgcttcatgcttcgattattcagcatgtcagattgagtcgccattcggtacacgagagctccggctcccattgccaaaagagaagtcatcgtccgattcatcctgcgcatctcctttcatgattaaaaattgatgctgcgttcatcctcagaaaacaaatcatccaagctgcttaacgttccgtcttcttccacctgatgagttgcaatcttccctttcgccactgtcagttcaataaaacagccccagcaataatattggttcacgccgattttgccgatatccttacttttgcaattcgggcatataagcatacctcacacctctatccgttcagaacgatctcgtctttccgcacctcgacaagcgaatccgctctttggatctggcgcttgcttcccgcaaggtcagaaaagaaaccgtccgagagttcatatgctacgattatgcccctgtccaaacaaaagtatacatcttccagcatccccaatatatcgccctcttgcgatttcacaagcttcatcttcatctgctcgtatgtgaagcatgatttcggaagaggcaaaagctgttctgaactgaccgaagccaatatgcggtcatcaagaatggaagagatatcacacgcccgtaatagcgcatgatgatgatgcaaaaagcgtttttgtgcaagaataaacccaagacaatctcctttcagagaaaaacaaatatcggaaattgccccgagataacaagaagttcgttctgagtatactgggaatccttctacttcatggcatgttctcaaagtgtgatcaaccaccttttgttgaacaggcttaggttttgctttgcgccttagactcatacgatgaaatcaattccactgcaaatgaaaaaaactcccgcttgcacgggagcattttattgctgttcttctttcataaaatcgaatggtgtaatgccttccatgccaatgttggcgtcgtgtacgctgaacgggagctctttttggagagcctcaagctcggcatccatttcctcaacctgtacggacagcctgttttttaaggaggtctgtctgacagttgcatcattatttttcacgccccactccagcgcctcctcttccccgcataaaatgagaaatttcttcgctcttgtaatcgcggtataaagaaggtttcttctgagcattctataatagcctttcacaacaggcaaaaccacaatcggaaattcacttccctgcgatttatgaatagaacagcaatacgcatgggtaaattgattaaaatcttttttcgtaaatgtcatttcattgccgtcaaaagaaacgacggccatgtcttctttttctgtattttcctttgcataaaatatcgacgtgatttcgccaatatctccgttgaacacattgttttccggctgattgacaagctgcaaaattttatctccggttctgtagacaacatccccgaacttcaattctctccgtttttctttaggaggatttaaaatgtcctgcagcatcacattcaattcattaatgccggcttttcctctgtacatcggagcgaggacctgaatgtcctttgctgtatagccttttttcaatgcattggcgacaaccttctcaactacttctttgatttgcgacccgccgcagcgaataaaggaacggtcctttgtcggggcagtcaaattgttcggcagcaatccatttttcatctggtgggcaagctcgacgattgatgacccttctgcctggcgatagatgtctgtcagtctcacagtcggaatcacctgggatgccagcaggtctctgagcacttgtcccggaccgacggaaggcagctggtcttcgtctccgacaatgatgatttgtatatgatcagggatcgccttgaacaaatgattcgccagccatatatcaagcatactggcttcatcgataattaacagcttcccttcgatcggctgatcctctgtatgagtaaagccttcagcaccgttccagccaagcagcctgtgtatcgtaactgcaggaagtcccgttgattcactcatccgttttgctgctctccctgtcggagcggccaaaacaatcggaaaagcttcatcctttttataagctgacggatctagtgacacaccgtgaagctctccgtagagctcgacaatccctctgattaccgtcgttttccctgttcccggaccgcctgttaaaagaagcatcggcgaggaaagggctttttgaatcgcttccttctggctgggggcatactgaacgttcatccgttcttccagttctcccaacgcgagcaaaaactctgattcgggaaactggttctcatattcggtttggctagcgatatgtttcacacgctttgcaacgttttgttctgcgtaaaacagcgaaggaaaataacagcggccatcttctatgacaatgtctttattttctccaagggcaataatcgcgttagcggcatccatttctgtgatgcgctgcccttcccttgctgactggtttaacagagattgggtgtcaatgatcagctgttccgtttctatgtacgtgtgcccctctgacagacaagtcgtttcaagcgtgtacaaaatagcagcttttacccgctcaggatggttacccgaaagacccattctgctgcccagctcatccgctttcccaaacccgatgccttctacatccttcacaagctgataaggattttcctgaatcttttcaagcgtctcagattcataggcttgatagattttcatagacagctgcgggccaaaaccaaactgattcaaggaaatcatgatttgctccagtccctgatgccgctgcaatgcgccagccagcgtgtcggctttcttttttgagagtctgggaacatcataaagcactgaagcgtcagccaatattttattaatggcgctgtcgcccagctttttcacaatttcttcagctgtttttttgccgatcccctcgaataaatcactcgataaatattgaatgatgccttccttagtcgttggaatctcctttttgaaatgctccgcctgaaattggagcccgaattttggatgagttacgatctttccgtaaaacgtgtaggtctcttcttcttgaagcgcagggaagtagcccgtcacggatacggctttatcttcaatggcttcggaggtctctgtgactttcactttcagaaccgtatataaattggtgtcattatgatagatgactgtgttgactgtcccttttaaatagggctcttcctccagtttaagctgatccggatgctgctgcacgagctgtccctcctcctgtgcctgttatgatggatcaatcagttttttagcatgaagcgcaagcatatgatctggctggatatcgattgccttgtccagcatttccagcgctttttctcggttttctttataagcataagcgacaccggcattataaaatgcatctgcatgccccgggtcttgctctgtcacagctgagaattggctgagcgcttcgtccagcatgccctcgttggctaagcacatcccgaattgaaagcgcgcttccgtatcgttttcattcagttcgactgctctttgtaaatatggcagtgcaagcttaggctgttcgagcttgacaagcaccgttccgagcatgtaaaacaggtcgccgttttccatccccgcacgaagcgctttttcaaacatgtctttggcttctttgtacatttcttttacaacatagacatttcctgctccataataagcagtggctgcgctactgtctaattcaagcgctttatcataaaacgcaagcgcacgttccagctcgtttacggatgaaagaaggttggcaaaattgatatacggaatcgcgtcttctttattttcttcaatcgcttttgtaaatgcctctgccgctttctcgtaatcgccttcctgcatcgcctctataccgagttgattataatccaccgatcatcttcctttcattaaaaaaccccaactcagtgttgaggtttttcatcttttatacgtaccacaattttgttccgtctttgtacacatcatcaattgtcccgccgccaaggcattcttcgccgtcatagaagacaacggcttgtcccggcgttacagcgcggacttgttcatcaaagatgacttccgcttcaccctcgccagtcatgcgcaccgttactttatgatcttcttggcggtaacggaatttagccgtgcaggaaatctcttcgcccttcatgatatccgaacgtacccagctgatatttgttgctgtgattttgtcagaatataaaagcgggttatggaacccttgatccacgtagaggatgttcttttcaagatctttgcctaccgcaaaccacggctcgccgcttccgccgatgccaaggccgtgacgctgtccgatcgtatagtacatcaacccgtcgtggcggccttttacttcgccgtccatcgtcatcatatcgcccggctgtgcagggagatattggctgagaaacgttttgaagttgcgttcgccgataaagcagatgcctgtactgtcttttttcgtcgccgttgcaagttctgcttctttggcgatttcacgcacacggcttttttgaagttcgccgatcgggaacatgactttgctcagcgtatcttctgtcagctgattcaggaagtacgtttgatccttgttttcatcaatgccgcgcagcattctgacttttccgccgcttctgtctactcttgcatagtggccagtcgctaaatagtcggcgccaagtgacaatgcatgctccaaaaaggctttgaatttaatttctttgttgcacaatacatccgggtttggtgttctgcctgctttatattcatcaaggaagtattgaaataccttctcataatattgcttttcaaagtttacggcataatacggaattccgatttggttgcagacgcggatcacatcttcataatcctctgtcgccgtgcaaaaaccgttttcgtccgtatcatcccagtttttcataaagattccgattacatcatagccctgttcttttaacagcagggccgccacagatgagtctactccgccggacatgccgacaacgactcttgtatcctccggccgtttttccatttcattcactccaattactacgccgccttattgtgtcagccgtttgacaacgtcggccacatgtttggcagcagttttcacttgctcagccgtattgccgaggccgaagctgattcgaatagaggacgtcagccggtcactctcttcgccgaacatagcagtcagaacatgtgacggcaggactgaaccggccgtgcacgctgaaccgctggagacagcgacaccagccatatcaagattaaccagcagcgcttccactgacacaccggggaaataaagattcagaacatgcggcagactatgctctttgtccccgttgacctcgaatgccacacctgcatctctaagcgtgtcggcaaagattgctttaaacgattgatacttctcgtttttttcgtcacgttcttcacttgacagcttgatcgcttctttcagcccgacaatgcctggaacattttccgttccggcacggcgttttctttcttgctctcctccgaataaaagcggtgaaagcttcacatctttactagcatataaaaagcctgtcccttttggcccgttgagcttgtgcccggaaacagacagaaggtcaatatggctgtttttcacatcaattggcagcaacccgaatgcctgaacagcatcggtatgaaaataagctttgtgttcctttaacagctcaccgatttcttcgatcggctgcactgttccaacttcattatttccatacatcactgtcacaaggattgtatcatcacgcagtgcttctttcacctgttttgcactgactcttccattttggtcaacgtccagatacgttatgtcaaatccgtcttcctcaagtttttcacatgtgtgaagcacggcgtgatgctcaatttttgttgtgatgatatgtctgccaagatcttttcttgcaagtgcggttcccatgatcgccaagttatcagcttccgttcccccgcttgtaaaaatgatctcctgctctgccgctccgatttctgctgcgatctgcgctcttgcttcatccacccattttcgagattctctgccaaatgaatgaatactggagggattaccgaaactgccggagaagtgcggtatcattttttccagcacgcgctcatccatcggagacgttgcggcatgatctaaataaatccgttccattatgtttacacctctgatctaaatatagaacatataagcttcttgctctccgtctgtatagctggcaagatcctctaatgttgtactgtctaaaacctcttttacagcatcccggatgcgaatccagagctcacgcttggcaggctcctcatcttccagcacttcaacagggctgatcggcccctcaagcacacggataatatctcccgcagtaatggcatccggctcactgcctaatacatatccgccatatgcgcctctgatgcttttcactaaaccggcatttctgagcggcgataccagctgctccaaataatgctcggacaaattattcgtctgtgcgatgctttttaatgaagtcgggccttcaccgtgcttttttgcaagctcgatcataatggtgagcccgtatcttcccttagttgatattttcaacatgaacacctctgttatttcatgattttccacatttataatggtaatttctatatgtttcgtccgtttattatcttatagaccaactgttattataacataccttcagcgaattttcattgaggcagaaggaaaggggcctttacccttttctaatgtacggttttccgttaccctgtaattaagtaaggagagatgatagatgaagccattggcatatcggatgcgtccgacaaaaatagaggatattatcggccagcagcatctggtggctgaagataaaattattggcagaatggtccaggcaaaacatttgtcatccatgattttgtacgggccgcccggaattggaaaaacatcaatcgcaacagcaatcgccggttcaacaagtattgcttttcgaaagctgaatgctgtcattaacaataaaaaagatatggaaatcgtagctcaggaagccaagatgtccggccaagtgattttgattctggatgaagtccacaggctggataaaggaaaacaggattttctattaccctatttagaaaacggaatgatcattttgatcggagcaacgacggctaacccgtatcatgccattaatccggcgatcagaagccggacccagatttttgagcttgaaccgttaacacctgatctgattaaacaggcactggaacgtgcgctccatgatgagcatcggggccttggcacctattctgtatccattgatgatcaggcgatggagcattttgcccacggatgcggaggagatgtccgctccgctttaaatgcgcttgagcttgccgtgttgtcaacgaaggagtcagcagacggtgaaattcacattacattagaaaccgcggaagaatgcttgcagaaaaaaagcttttctcacgataaagatggtgacgcgcattatgatgtactgtccgcttttcaaaaatcgatccgcggctctgatgccaacgctgctcttcactatttggctagattaattgaagccggtgatctggagagcatcgcaagacgattgcttgttatcgcctatgaagatatcggtttagcaagcccgcaagccggtcctagagtgctgaacgctattcagaccgctgagcgagtcgggtttcctgaagcgcgaatcccactggccaacgcagttattgagctttgcctctcaccgaaatcaaactctgccattctggcaatcgatgaggccctggcagatatcagagccggaaaaattggggatgtcccgaagcatttaaaagacgcgcattataaaggagctcaggaattaggaagaggaatcgactataaatacccgcacaattacgacaacggttgggtcgaacaacaatacctccctgatcctctgaaaaataagcaatactataagccgaaacagacaggaaaattcgaatccgccttaaagcaggtgtacgataaattaatgaaaagaaaataaaacaaaaacagccttgatcatcaaggctgtttttatgcattatttatccttcacacgtttgatttcaatgtctttcaaaagatccatgacaacatgtccgcccataatcaaacctgcaactgacggcacaaaagcattagaggaaggcggcatttttgctttacggattttcgcttcgtcattccccacttcttttctgacatcttcccgaatgacaatcgggctttcatcagagaaaatcacttgaacgccttttttgataccctccttgcgtaatttcgtacggacgaccttcgcaattggatcagtgtgcgtttttgagatatcagcgatttggaagcgtgtcggatccgttttatttgcagcacccatgctggagatgagcggaatatcccgtttcagacattccttcattaaatgaattttataacaaatggtgtctgacgcatcaatgacatagtcaagatcatagtcaaaaaactgctcatacgtttcctccgtatagaacatttttaacgagattacttcacactccgggttaatgtctgcgatccgcgccttcattaaatcaactttcggctgtccgacagttgaaagcagcgcgtgaagctgacggtttacatttgtaatgtcgacatcatctttgtcgacaagcagaatgcggccgacgcctgaccgcgcgagagcttccgccgcgaacgacccgactcctccgactccaagcacagcaactgtgctgtttttcagcgtttcaaggccttcttttccgatagctaattcattgcgtgaaaactggtgtaacaagaacctcactccacattcgtattctggtttcatctataaaatggctgatccatgagcagccgtttttctgcgcacaaaaaataaagtcccaatagtgccgttgcagctttcctttgttttgaacccgctctcagcaggtgggtgccctcttttaaatcttgtaagtcctctttaccgaatgaaaagaggcatgtacgccatttaaaaatgcgggctcccaaatcaaaaaaatgttcggtcaaaactaggtgtacaactaacacatcaggactttatttaacttgtcaaaatcatatcacagacgattttgattttcaagaatccaactgcacattcagttcttaacttttttcttgatagaaagatgaagctcgtcaagctgagcgtcacttacttctccaggcgcctctgtcatcaggcagcttgcacttgccgttttcgggaatgcaatcgtatctctcaggttcgtacgtcctgcgagaagcataacgagacggtctaagccaagtgcgattccgccgtgcggaggagcgccgtattcaaatgcttccagcaggaatccgaactgttcagccgcttcttctggtgagaagccgagaagcgcaaacattttttcctgaatatccttttcaaaaatacggattgaaccgccgccaagctcatagccgtttaagacgaggtcataagcttgtgctttcatgtcttcaggcgctgtttcaatcagctcaaggtcttctcggacaggcattgtgaacggatggtgtgctgcgtaaaaacggccttcttccggatcatgctctaataacggccagtcgatgacccataagaaattaaacaatttttcgtcaatcagcccgcgctctttcccaagctttaagcgcagggcgccgagtgatgcggccacaacttcgaattgatccgctccgaacagcagcaaatcaccttcagcagcatcaagtgcttcaatcagcttagactgcttttcttcatcaaagaatttagcgatcgggcctttcactccgtctgcctcaaccttcacccaggcaagcccttttgccccgtagtttgcagcaaaagcgccaagagcgtcgatgtcttttctggagtaatcgccggcaccgccttttacgttgatggctttaaccacgccgccgtttgctacagctgatgagaacactttaaattccgtatcctttacaatgtcagacacatccgtcaaaagcatgtcaaaacgcgtatccggtttatcagaaccgtacttgttcattgcttcgtcatacgtcattcgaggaagaggaagcttaagttcctcaccttttgtttcacgcataacctttgccatcatctcctcagccaatgacataatgtcttcctggctcataaaggacatttcaatatcaatttgcgtaaactcaggctgacggtccgcacgcaagtcttcatcgcggaaacagcgggcaatttgataatatcgttcaatgcctgataccatcagaagctgtttaaatagctgcggggactgcggcagcgcatagaactcaccttcgtgcacacggctcggcaccaagtagtcacgtgcgccttcaggcgtgcttcctgttaaaatcggcgtttcaatatcaagaaacccattttcatctaaaaagctgcgaacagctttcgtcacgttatggcgcagctgcatcgtctggaacatagccggtctgcgcaaatctaagtaacggtgttttaaacgaacgtcctctgacacttcttcagcttgatcagaaatcgcaaatggaggtgtctttgcagcatttaatacgttcactccatcagcatgtatttcgatcgcgcctgttttcaaattcggattaactgttccctcttcacgcgccaccacttttccttgaatatcaagcacgtattcatttctgatgccttccgcgatagcaagcgcttcttttgacacatcagggttaaaaacgacttgaacaatgcccgtacggtcacgcaagtcaataaaaatcaatccgccgaggtctcgtcttttttggacccagcctttcagcgttacagattcgccaattgctttttcagttatatcaccgcaataatatgttcttccaaacaatgcgtttcactccttatcccttttggtttgccttcatcacatgtataaattcatcaagtgccacttcaatctgttcgcccgtctgtgcatcctttacattgattttgttttgggcaagctcatcttcacccaaaatcgcaataaatctggcctttaagcgatcagctgttttaaactggcctttcattttcttattttcataatcgatttcactggaaatgcctgcttctctcagtttgtacaccaatgaaacagaataatcctttgctttttcgccgagtgtgacgatatagcagtcgattcccttatcaacaggcagctctcttttttcagcatcaattgcggcaagcaagcgttcgatgctcatcgcaaatccgatgcccggtgcttcaggtccgccgatctgttcgacaagcccgtcgtagcgtccgccgccggcaagtgtcgtaatcgcgccaaagccctccgcattgctcataatttcaaatgcggtgtggttgtaataatccagccctctcacaaggttcggatcgatttcatacgaaatgccaagatcatttaagtattgtttcactttttcaaaataagcggctgattcttcatttaaatatgtcaaaatcgaaggtgccgatttcatcagctcatgatcacggtcttttttgcagtccaaaattctaagcgggttcgtgtgcagccgggactggcagtctgaacaaaattcttcgatgcgaggctcgaagtgtttcacgagcgcttctctgtagcttttgcggctatcttgatcgccgagactgtttatgacaagcttaacgttttctaaacctgctttttcataaatactcatcgcaagcgccattacttcagcgtcgattgcagggtctttcgaaccaatcgcttcaattccaaactgataaaactggcggtaacggcccgtctgaggacgttcataacggaacatcggcccgacataataaagctttgtcggctgtacaggatttgcgaacagcttgttttcattaaaagcgcgaaccgcagcagctgttccctccggacgaagcgtcaggcttctgcctttgcggtcctcgaaggtatacatttctttttgtacgatatccgttgattctccgacgcctctggcaaacagttctgtatgctcaaaaatcggtgtgcggatttctttatattgataagtgcggcaagtgtctctcataatttgttcaacaaactgccagcgatctgattctccaggcagaatatcctgtgttcctctcggaatgttatatcccataggtagacctccttatgtattccttataaaatatccaatgatcgttaatgatgaaaatgaaaaaaactcccgcccctactatacatgatagtagggacgagagttatacccgtggtgccaccctagttggaatacgttcatattcccgctcgatcctttaacgcaggttcacgttcactgcctaatggcgttattcacgcgttcagcaggaaacctccggagtgttgtttcgagaaagacgcaatgggatccgctttcagcctggggcgggttcctctctaatcatgcaatctgacctactcttctccattattggttcaaatctttcatcatttgctatgtactcaatttctattataataatgggattggggttctctgtcaagctttattccggttgtttttcctcagcgctgcttctttggacataagaccaaattcagatgctgtttccgtaagataaccagtcgtatcgggatctgcgtgatcgctgtaatgcagattcgcttcaccgtcgtgaaatgcacgtcccatttttggatgatatttcatgatttgcacacctttttgattgtatttacgcttagtataaacaaatcattttatttttatttaaaaatcagaaaggactttacgatattaaacaagaatgcttttttaatgatcatcagaaaggaggacacaatgaacaagaaatactttgtccttattgtatgtattattttcacctcagcgctattcccgaccttttcatccgttacagctgctcaaggagaagcggtcatcgcaacagatgaaatgaacgtcagaagcggcccagggcttagctacggcattacagcggaagtaaaaaagggagaacgctatccaattttaaaggaagatggagactgggtgcagatacagcttggttctggagaaaagggctgggtagtctcctggcttattacaaaggaagaccaggccagcacaagctcctcaggaagcagtgacactgtgacatcaacagaccccgatctgcggatgagaagcggcccgggcacttcctacgaagtcatcggcaaattcccgcaaggcagccaagcatctgtcattgataaagattcgggctggatcaagatatcctatcacagtgccaccggatgggtatcatctgaatatgtcacatcaggaggcagcagttcagcgtctgatgagagtgaccaaaccgaggattccggtgcgtcaacgacgggcacagtcggtgtttcttcgctaaatgtaagagcctccgcctcacatgacgcggcaattataacaaaacttgatcgcggaacgaaactgacggttctcaacgagaaaaatggctgggctcacattgaggtgaacgggctaaaaggctgggttgcaagccattaccttttgactagttctgttccagctgatgattcagcaaatgccggcagttcatcctccgctaaaaaagcctatatcatgtacggaggaacgaatctaagaagtgatgcgtcaacatcagcttcgatcgttgagcgcgctgccaaaggagattcatacaccattaccggttcaaagggaagctggtatgaaataaagcttgataacgggcagactgcttatgtagccaattgggtggtccaaacgtctaaaagcgcagaagaagcaggtgaaccgccagtctctgattccccgtctggaaacggctctctaaacaataaaacgattattgttgacccgggacatggaggaaaagacagcggaacgatcgggtattcggggaaattcgagaaaaacctgacgatcaaaacggcaaaactgctcgccagcaaacttagatcggctggagcggatgtatatgtgacacgccaggatgatacctttgtcagcctgcagtcacgggtctctacctctcactaccgtaacgctgacgcctttatcagcattcattatgacagctatgcggatacctctacaagaggcagtacagcatattactacagtcctgccaaagatcaggaactcgcatcagatgtccactcagaagtggtgaagcgttcttccattccagaccgcggcgtattattcggagattattatgtgctccgggaaaacagacagcccgctatgctgtacgagctgggatatgtaagccatccgcaggaagaagccattgtacatagcaattcataccaagaaaaagtaacagatgggatcgaaagcggattagagaaatacttccaataaaaaaagctgccttttggcagctttttttattttgaatccataatgagcgtgaccggtccggagtttgtaagctgaacatccatcattgctccaaacgttccggtctccactttgattcctttttcacgaagcaggtcattccatttttcataaagacctaaagctttatcaggtttggccgcgttcatgtagttcggccggcgcccttttttcgtatctccataaagcgtaaactgtgagacggataaaatctctcctcctatatctacaagagacagattcattttcccttcactgtcatcgaaaatacggagattgacaactttatcggctaaataagctgcatcatcttctgtatcatcgtgagtgatgccgaccagcaccataaggccttgtccaatttggccgacgacctcttcgtccactgtaacgcttgcttctgttactcgctgaacaactaatctcattttctaacccctttagttcatgacgcggcgcacagagtagatatctctaatctgtttaatacgctcgacgactttgtgcaagtgattgatattctgtatgaaaatcgccatatggatggttgccactttattgcgatccgatttgccagagacagatgaaatattggttttcgtttcattcactgcctggagcacctcgttcagcaatccgcggcggtcatacccaagaatctctatctcaacattgtattccttgcgcttttgaacttgtgactcatgctcccactctaccgggatcagccgctcttgggcttcattcgttttgacattcggacagtcttcgcgatggaccgaaacccctctgccttttgtgataaagccgacaatatcatcacctggcacaggattgcagcattttgataaacggacaaggaggttgtcaatgcccttgacacgaacgccagcttcccgttttcttccttgcgggtatggcttaggttccccagtgacttcctgaacgatcttttcctgttcttcctgatcgcgctgctttctctctttttctgttaggcggttcgccacctgcagagctgtgatgccgttgtaaccgaccgccgcgtacatatcctcttcatttgagaaattaaatttgtcagcaaccttttgaatattctccggcgttaaaacatccttcaattcaaaatccaagtttttaatttctttttcgaccagctcacggcctttttcgacattttcttcacgccgctgtttcttaaagaattgacggattttatgcttcgcttgggatgtttgggcaagcttcacccaatcctggctcgggccgtaggaatgcttagaggtgagaatttcaacgatatcacctgtccgaagcttatggtcaagcgtaaccatttttccgtttactttggcaccgattgttttattgccgatttcagagtgaatccggtaagaaaagtcaatcggaacagaaccggacggaagctcgattacatctccttttggcgtaaagacatacaccatgtcagagaacaaatcaattttgagcgattccataaattcttctgcatctgtcgattcattttgaaattctaaaatttcacggaaccaagaaagctttttctcaaaggttgcaccttcattggctgctttcccttctttataagcccagtgagccgcaaccccgtattccgctatttcatgcatttcaaaggtgcggatctgcacttcaagcggatcgcctttaggcccaataaccgttgtatgaagcgattgatacatattcggcttcggcattgcgatataatctttgaatctgccgggcatcggtttccagcatgtgtgaatgatgccaagcaccgcgtagcagtcctttatgctattcacaagaatacggacagccagcaaatcgtaaatttcattgaattgcttattttgcagcaccatttttcgataaatgctgtaaatatgtttcggacgtcccgagaagtcagccttgatatttacttcttcgacacgtttcttcacttcattgacaacctcatcgacataaagctcacgttctgcacgtttcttcttcatgaggttgacaattctgtaatattgctgagggttcaaataacggagcgccgtatcttccaattcccacttaatttttgaaatcccgagacgatgcgccaaaggagcaaaaatttccagcgtttcattggagattctccgctgtttttcctgaggcagatgtttcagtgtccgcatattgtgaagacgatccgccagcttgatcaatatgaccctgatatcttgagccatagcgacaaacattttgcgatgattttccgcctgctgttcctcttgagatttatatttaattttgccgagtttcgttacgccgtctacaagcattgccacttcttcggaaaatgcttctttcaggtcatcgagcgtcacatctgtatcttccacgacatcgtgcaaaaatccgcccgcgattgtggaagggtccatttcaagatcaacgagaatccccgcaacctgaatcggatgaataatatatggctcgcccgatttgcggtattgctcgcgatgagcatcttcagcgtacagatatgctttttcgacaaatgcgatatgctcatcagatagatagctgcgcgctttatctataacttgctcggcagtcaatacttgttcgttcgccatggaatcaccttttttaaaatgtaaactgtattgtagtttattatcaagaaaaaaacgaaagatgtaaagagcagaagttcaaatagccaaatattatataaaataaatgcaaaacaataggaaaaaagcaccctgacatggagtgctttttcgttatgcggttatccttagtatttcatcaatgttaagatgtcgtaatcttcgagcttatttctgccgtcaaggtaagaaagctcgattaagaaagcgataccagcaacaacgccgccaagttcttcaacaagtttgattgtcgcttcaattgtgccgcctgtcgcaagcaggtcatctgtaataagcacacgctgaccaggcttaatcgcatctttgtggatcgttaatacgtcttttccgtattccaagccataatccactttgattacttcacgaggcaacttgccttctttgcggaccggcgcaaaacctacgccaagcgcgtaagcaacgggacagccgataataaagccgcgcgcttcagggccaacgaccaaatcaatttgcttttctttcgcatattcaacaatttgatctgtggcatagcggtatacatcgcctttatccatcagtgtcgtaatatctttaaattgcacgccctctttcgggtaatccggtacaattgttacgtattgttttaaatccatctgttttatgtcctcctcgtactttcataagcctctgaatcttgtttcatcagcttattcagccattccttcagctcttcagcagaagaataattcagcttttgatccagttccatcagctgctgtttcgcctgatatgtttgtgagtctgttaagtcgcgtttctttgctccgctcacaacagacagcacaccattctctattttaacaaaaccgagatcaaaaaacacctttgtcatgaaattgattgtttcaacggaccagcctttatgttttgcaagctctgaaccgtgttttttcacgtcaaaagcgcctcttttcagcaagaacgcataataccatttaaagtggtctcttgcgggaaaagttgataaaaagtggtcctcatgattgagaaaaataaaatatatccgctcgggcgcctttccttccagcaaacgtgcgagcatgtccagcgaaggcggcggatccagtaatacaatatatgcaccatcgaggtcaaacgcctttgcttgatctttagaactgatgacgtgcacttctcggcgaaggtcttcagtttgaagtaatgttgttgagtcttctttgaaagagacaatggcccgtttagcagatggaagggcggaaactgtgtcttcccacgtccgttttccccttaaatcaaacagctgccattcagaaacagcggcatcctttatcataagctgcggcttttttcgattgttccattcgttgattgacatctcaccgacaatagaaattcttgaacccggtacgatgccttcttcaagctcgcctttattaaaaccgacgcaatcaagctgggacgactcgtttctgatcgtcattttgacatgagttttatttgcccctatcttgcggacatcttccagtactgcgttttctacgagaacgtgcggtttcgggttcagcatgccaaaaggagacagcatgttcatttctgcgatgctttcaactgtaatgtcttcgacgccgcagacaaggtcgacttcctgtacgggaataaaatcctcttccgtaagcgtattgtccgctatttcattcagcctgcttcgcaaatccggcacatcttcggctttcagcgtcatccccgcagccattggatggccgccgaaatgaggaagaatatctctgcattcagaaaggctctcaaataaattaaatcctctgatgcttcgggccgaacctttagcgattcccttttcttcatcaataccaagaacaatggccggtcggtagaaacggtccacaagctttgaagccacaatcccgacgactcccgggttccatccggctttggccacgacaattgcagtttgatcgagcccttgctgttcaaccatgtcaatcgcttcatccgtcattttgctgaccattttttggcgctctttgttcagctggtcaatttctgcggcaagctcttccgcttcaaacgaatcctctgacataagcaaatgaacagcgggatccgcctgttcgattcttccgacggcattcagccttggtgcgagctgaaatccgactgtttcttcgttcgcttctccgatgtctccgcctgacagcttaatcagctcttttaagccgagccgatttgtccgtcgaagcctttcaagtcctagtgttgctattaatctgttttcgtcatgcagcgggactagatcggcaatggtgccgatagccgccaggtcaagcagttcatcaggaagttcacccaataaagcgtgggcaagcttaaacgcgactccaaccccggcaagctctttaaacgggtaagtgcagccaggctgcttcgggtggacgatcgcacggacatccggaagctccggtcccggttcatgatgatcggtaatgatgacatccagtccgagttcctttgccaccttcgcttcatgcacagcggcaattcctgtatcaaccgtaatgatcaaagagaagccccgttctttaattgaacgaaacgcctgttcattaggtccatatccttctttaaaacggtcaggtatataaaaatcaacttgagccgacagtttttgcagcgtgtgaagcatcactgacgtacttgtaaccccatcggcgtcataatcgccatatatcataatcttttcttgttgtgaaatcgcctgttttattcgatctgccgcttctttcatgcctttcatttcaaaaggatcataaaaatcggcatcctttgtatgtaaaaacagcctagcgctttctgccgtatcaaagcctctttttacaagcagggacgcaacaagaggtgttatatgcaattgttctgtgagtgatttgaccttatcctgatctggtcgctggatttcccatcgcatttttgacgctaacataaattcacccctcaaccaccctattatactagagcaggctgaggggtttcaaataatattcgaaaactagtcttttttctcaatcatggctgatgcatcctgtgtgtcagtctgatcagcaagatgagtatcctcttgtttatgtattgctgttctattttctttccgcaaggtttttatttcccgcttcaatttcattacctgaaaaatgccgacagaaaatacgatcagtgctcccattaaaactgagcccaaaataacaagaatgagcggccattctgatcttccaaacaggtaatcaacttctacggatcgaacattaatgactgcgaaaatagcgacaattaaggtgaaaataagtgcgaaaataatggtccattgtttattcattctcttttcccccaaacttcttattgaggtaactttccccatcaagactggttttaaacatggcttaacactaggttaagctccctttgctgttaatttttcccggatcagcctcttcagtccggttccctcaccggaaatcacaagtgtatcgccttcgtcaatgactgtttcagagctcggattcagttgtttatcctgattctttttaacaattgcaatgaccgtcacatgatattcctgacccacattcaaatcaccaatcgtctgatgaatggcaggcgctcccgcctctgctttacaccactctataatcaaatcatcaagggctgactcgacctgttctaatgctttcggtttatatgccattccgccaagaattgcagacatttgccttgcttcagcgtcatcaaactgcacggaggcaacacattcctcatggtcgttttcgtcaaaatagtaaagctctctccgtccgtcatgatgaatgataattgaaattttatcacggtttctagtaatcatttcaactttttgtcctatgcccggcagctctgattcgcgaaccctcatatataaaccctcctacatatctgaaaaccagccataaacacttttaacaccatatatatgtttaaatgtaagcgtatgtcattatagcaaatgtctattttaagttcaatgaaacttcaaaaaacaggctgccctgcagaggacagcctgatattttttattgcgccgaatcttttttcagttctcttcctttccatgcaagccaaatttgtgcggcaatgtatagagaagaataaacgcctgttaacagcccgaccaataaagcaattgagaagttagtaatagaagatgctccaaagatcagcaatgtcacaacaacaatcacaacggttaatacagtgttaattgaacgtgtaaaggtttgctgcaggctcaggtttactatatggttcagatcggcaaatgttttcggcttacgctttttcatatgctcgcggaccctgtcaaatgtaacgattgtatcgttaatggaatacccgattatcgtcaagatggccgcgatgaacgtaacatctacttcaagccttgtaatactgaagaatgtgacgataaagaatgcgtcatatagcaatgaagcaatggcagcaatcgccattttgtattcgaatcggattgaaacgtaaataatgatgccaatagaagctatagcaactgcgtacagcgcatttcttgccagctccttaccgactgtcggtgaaactgtgctgacatttggctcagacccgtatttgtctttaaaatacgtttttacttttgctatggtttctttatctggcaccccgacaaaacgggcaacaccgatattgctcttttcgcctgacagaactacagtatcagggtccatacccagagattcaaaatccttctcaacttgctctgtcgtcagcttatggtcgctttgtacttcaatccgtgcaccgcttgcaaagtcaatgccaagattcagcctgaacacaagcaggataataatcccggcaaccgtgaccgcactggagaaaataaagaagtatttgcgtttgctcgtgaaatcccatttttggaatggcgtatgcggctctgtattttcatccgtatcctgaatatccatgatatgtttcttattgacaccaaaccagccttttttccgatcaagccatctgctttccacaaggagagcgaggagaaatctcgataagaaaacggcagtgataaagcttgtcaaaatcgataggatcagcattgtcgcaaaccctttaacagagcttgtcccaaagataaagagcacaaccgctgcaataatggttgtaatattcgcgtcaaaaatcgtcgcaaatgaccgtctgtttcctgaacggaaggcagagcggactgactttcctagcttgagctcttctttaatccgctcataggtaataatgttggcgtcaacagccatcccgacacctaaaatgagagcggcaattcccggaagcgtgagtacggcattcatccagtcaaagatctggagtgtaatgtagatataaacagacagcgtaatcaccgcgattaatcccggcagacggtaatagaaaagcataaataagaaaataattgcgataccgacaataccggcaaacaccgtatcatggagagcctgctggccgaattgtgcgcctactgatgtcgaatatttttcagtcagtttcacaggaagtgcgcctgcatttaaaatgctggctaaatcttttgcttcttgaaccgtaaattgcccttcaattgtaacatcagttgtgtttaattcctggcttacatttggggcggatacatatttagggtgctctttttgaacctcttttttaaaggagtcccctttttcgtaatccatccaaataacaagctggttgtttggcgccattttcatgacctttttggtcacttcgccgaatttatcagcatctttcagtttaatgctgacaatcggttcatttgttttggcgtcatacgtttgtttagctccgttttcgacgaggtcagagccattcagcaattctttgtcattcgtatctctgaaagaaagctgcgcttcagtcgccaaaatttcacgcgctctgttttggtttgtcacaccagcgagctgaacgcgaatccggttattcccttcaatttggatgttcggttcgctgacaccgagaacattggcccggcggttcaatgcctctactgtgctgaccagaacgtcttttgtgattttgtcacctttttttacaggctgtacatcatacagcacctcaaatccgccttgcaaatccaatcctaacgtaatattgttagcggcaggcttcgtaaagtagcccaagcccgtgccaatcaatagaacgaaaaggaaaaacgcaatcaagcgtccttttttcattatgtatatcctcccttaaacctgtgcgaatcaacctgctatctcagcagttcttccaatgcttcctggccctcttcactgcccagccaattagacgttttaaatgactcaacggttgcatagttcataaattcgccaattttcactgataaaatatcactcgccagttcataaatgttcagttccgttttctttttccacttcttatctgttaagtatgaccacaaactttcgagttcaacatcatcatacccgagaatcttaaactcttccagtttgctgtaaagaaacggcctgacgtggtctttatatagatcggctggatgcttctccacgaattccacgctccttttttattgtttttcaagaagacttgtcatgcttggacgatatatacgcatatctttattgtatatgattccaggtagtttgagaaggcagggggtaaaaatggcgaaacagacgtttttaaagggcactcttatccttatcgcagcaggaatggttacaagaatgctcgggtttgtcaaccgggtggttatcgcccgttttatcggtgaagaaggagtcgggctttacatgatggcggcgcctaccttcttcttggccactacattaactcaattcggtctgccggtcgcgatcagcaagctagtcgctgaagccagtgcgcgcggagatcatcaaaaaacgaaaaatattttagtcatgtctctgaccatcacgggagtgctcagcctcatctttacaccgctgtttctgtttttcgccccggttatggctgaaacgatgctgacagataagcgaacactgtatccgctcttggccattacgccggttgtgccgattattgctatatcgagtgtgctgaggggatactttcaaggaaaacagaatatgaacccgcttgctatgtcacaagtccttgaacaggttgtccgcatttcactcgtggctgtctgcacaacgatttttctcccttacggaattgaatatgctgcagcgggggcaatgctatcctcagtggcaggggagctggcatcacttctttatttattcgtttgctttaagtataaaaagacaattaaaatcagaaagcattttttccagtcaattaaaaacggaaaacaaacctttacccaattaatgagcgtgtcccttccaacaaccgggagccgctttatcggaaacctctcttggtttttcgagccaatcgtcgtcgctcaaagccttgccatcgccggtgtggcaacagttgccgcaacaaagcaatacggggaactgaccggctttgccatgacgttgctgactctgcctagctttattacatattctttgtcgaccgcgcttgttcctgcgatcagtgaaggaatggagcagaaaaaattgcaggtggtggaataccgcttggaacaggcgatgcgtctctgtctgctcagcggaggcatttcagttgttattttatttgtatttgcggatgagctgatgagagtgatgtacggttcttcaggcgcagctgtatttataaaagtgatggccccgttttttctgctttattattttcaaggcccgcttcaagctgttctgcaggcgcttaatttggcaggagctgcgatgatgaacagcttaatcggagcgctagtcaaaacaggccttatttttgtccttgccacaaggccttctcttggcattatgggcgcggcattagccattgtgacaggcatggtgctcgtcacgctattgcacgcagcaaccgtaagcaaagtgctgccgatcagcatcaaaatcaaggagtacgcgctcagcttcgctgttattgtaatttgcggattcatcagctccgccatcaaacattatataagctttggagcatctgaggctgtcaatctagccggatggattgcggtgagcgccgccatttatatgatcctcctgctcgttttccgtttaattaaaaaagatgagcttcgccgcattcccattatcggacgtctgatcatccgataatagtcacgtgcggtacccatctttttcgtcaataaataattctccgtctgtaaacgagcaaaatgaaatatctgaagggtttgtgtatccgtgtttttgcaaactttcaagcagccattttctatctttactgattctggacaggttttctgtttgaatgaagccgtctataatgagcggcatttcgagctgccgatgctctccgctattttctttctttacaatagtcagtttgcccgacggctctaaaatggcaaatgatacgtcagctactctgtcgacgctattttctctgagttgaaccattaaatcatcaaaattatatcgctgtgatttcatggcttcttcgtcaatttttccatatttgataattatagtcggcttaccgtcaagaagctggcggacttttcggttttttaaagaaaagtatgccaaagtcacttgaatgatcattaatacaagcattggcaaaatggtatgaaatagatgatcgtctacgttttctatggctaaaacggcaatttcagccatcatgataaagacaacgagatctaaaatactaagctctccgatctcccgtttgcccatgaaacgaaaaatgaccaatatcacaaaatacaatacgactgtgcgaaacgcaatagtgagaagctcttccatcatgcacctccaactcattataggttgcaacaaaatgatcaatttatgtaagaaaaaccgattgcatttcacaaagcttttacgtctaattcaagggataagggaatacatttttacaaagacgagccatcagcatgtctgacggctttgtgcaaaaagaacagaagccttttaatacaggcagagaggagacaatcatggaggaaacgaaacaagttggaaaaggcattctttacggcttaatcgccatattttcagccatgctcctgacaagtttggcggtttcacttttattgaccgcaacctcgctggaagaatcatcatttaactggctgatcacagctatctcatttctctctttatttatcggcgggttcatttcaggcgggaaaggcaaggaaagaggctggatgattggcgcattgaccgccttaagtttttctctgattatcttattgtttcagtatttaggattcggaaagacatttacagcagaacagctgatcttccatctgggatttttaggggtgtgcatgctgggcgggattttcggcgtgaacatgaggggaaacaggtcttccacataaaaaagagcgggctcacttgcccgctcttttttgtttgctatgtatagctcctgctgttattcagcagcagaaacttctctgatcgcgcggcggtcgaacgtaagacgtgtgttatcaccagtcttaattacgactttgctttcgtcgatagagtcaacagtaccgtgcaatcccccgattgtcactactgaatcgccttttttcagttcctcttgcatttggcgtacagccttttgctgcttttgctgaggacgaatcagcaagaagtaaaggaccgcaaacattaaaataataggaaccaatgtacctaaagtgccagtcatcattttcacccctttctgtaagcctgttatgtttatttagaagcttttcgcatttggcttgttatagccgtaacgctcaaagaactcttctctgaaatcacccagacgatcctcgcgaatagcctgtcttacctgctccattaagtgtaacagaaaatgaaggttatggtaagttgttaatcgaaggccgaatgtttcattacagcgaatcaagtgcctaatgtacgcgcgagtgtagtttttacatgtatagcaatcacactcttcatcaatcggacggaagtctctttcaaatttcgcatttttcatattgagtcgtccttcagcagtaaacactgtgccgtttcttgcaatccgtgtaggcagcacacagtcaaacatatcgaccccgcggatcgctccgtcgatcagtgcatccggagaacctactcccatcagatatctcggtttatccttcggcaagagcggtgttgtaaattcgagtacacggttcatgacatccttcggttcacctacagacaatccgcctatagcatatcccggaaaatcaagcgaaatcaagtccttcgcactttgtgtccgcagatcttcatattctccgccttgtacaataccaaacagcccttgttcatcctgacgattgtgggcattcaggcagcgttccgcccagcggcttgtccgctcaactgacctcttcatgtagtcgtactccgccgggtatggcgggcattcatcaaacgccatcataatatcagagccgagtgcgttttggatctccatcgctttttccggagataaaaacagcttgtctccatttagatgattgcggaaatggacaccctcttcctctatattacgaaacttgcttaaagaaaagacctgaaaaccgcctgaatcggttaaaattgcgcggtcccagttcataaatttatggagcccgcccgcttctttgacaatgtcttggcccggacgaagccatagatgataagtattgctcaaaatgatgcctgcatccattgctttcagctcttcaggcgacattgttttgactgtcgccagtgtgccgaccggcataaaaaccggcgtttcaaaggagccgtgaggcgtatgcactttgcccagccgcgctcctgtttgtttgcattcttttataaattcatagcgtattggttgttcagccacttttgatgaggcctcctgttctcaaattatataatcagcatcgcgtctccgaagctgaagaaacggtattcctcttccactgcatggttataggcacgcagaatgttttctcttccagcaagcgcgctgaccagcataatcaatgacgatttcggcaaatggaagtttgtaatcattccgtcaatggctttaaattcatagcccggataaataaaaatagatgtccagccgcttgatgctttaaattgcccgtcatgttccccggcaatcgtctcaagcgtgcgtgtcgaggtcgtgccgacagaaatgatccgaccgccattttctcttactttgtttaaggctgcagccgtttcttctgacatttgataaaactctgcatgcatattatgctcttccacttcatcggcactcacagggcgaaacgttccaaggcctacgtgcagtgtgatgaactcaatttgcacgcctttgtctttcagctgctgtaagatttcttccgtgaagtgaaggccagctgtaggcgcagcagcagagccgatttcttttgaatacactgtctggtagcgctctttgtcatcaagctgttctttgatatatggagggagcggcatctctccaagggattcaagcacctcgtagaaaataccgtcatattgaaattccatctttctgccgccgtgctcaagctcttccgtgcagattgccttcaatcttccgtctccaaatgtgacaacagttccttttttcacccgtttcgccggtttggcaagtgtttcccatttatcaccggtttcctgtttcaacaaaagaagttccactttcgcgccggtatcctcttttgtgccgaataaccgcgcaggcagtacccgggtattgttcaggactagacaatcgccttcgttaaagaagctgataatgtgtttaaacgagctgtcagtaagctctcctgtatgtttatcgagcaccatcagccttgaagcatcacgctgctccaacggtacttgtgcaattaaacgttctggtagttcaaaatcaaataaatcgactttcatgatgatttcacctttattctagtcttttgttatttcattctgccaaaaagattaagcaaaattgataataccacacttataataatacaagtgacaaccgggaagaaaaacgtgacatttcctttttttacaaaaatatctcccggcatcttgccgacaaaatgcaaaactgctccgataataagcaaaacagcaccaagaatcataatgatcttaggaaattcagtcatatcggggagcctccatttggaaatgatgataaacggccggtgtcacgatccttccacgcggcgttctttgtataaatccaatttgcagcagatatggttcatatacgtcttcaatcgtatgcgattcctcgccgatggtagctgaaatcgtatcaaggcctactgggccgccgttgaatttttcgatcatgcccatcagcagcttatgatcaatatgatccaaaccgaggcggtcaacctgaagccgctccagcgcattctgagaaatgtcttccgtaatcctgctgtcacccagcacttgggcgaaatcgcgcacccttctcagcaggcggttcgccacgcggggcgtccctctcgatcttcttgcaatttcaagagccgacggtttatcaatctcaacctcgaatacatcagcggttcttgtgacaatatccgccagttcttcttgtgtatagtactcaaggcgagacatgacgccgaatctgtctcttaaaggagccgtcaaaagccccaccctcgtcgtggctcccaccagcgtaaaaggcggaaggtcgaggcgaaccgagcgggcagatgggcctttgccaatcacaatgtccaggcaaaagtcttccattgcaggataaagcacctcttcgatcgatctgtgcagcctatgtatttcatcaataaataatacatctcccggttccagcgccgttaatatagcagccaaatcaccaggcctttcaatcgcaggccctgatgtcgtccgcaattccactcccatttcattagcaacaatcgaagcaagcgttgtttttccgagtccgggcggcccgtacagaagaacatgatccagcgtctcctgtctcattttcgccgcatctataaacacgcgcaaattttcttttaccttatgctgcccgatatactgtgccagattttgcggcctcaggctttgctctatcactgattcatggttgtctgcttcacttgagacgagccgttcatccatgaacatcaccttactttaatagtttttgtaatgcttttttcacatattggtctgttgtcagcccaatttcttctttaaggtgaggaagcacctttttgatttctttttcagcatatccgagaaccctgagggcttcaagtgcttcttcaagagccgtttccgctgtttgcttttcaagcctttcttcatgattaaacagattttcaatcatttcaggcacaacatctgccagctttccttttaaatctagaataatctggcgtgcggttttttttcctactccaggaaacttgaccaaaaaagcttcatcttcattttcaattgcttgaatgaccgctccgggatcacccgagcccaagatggcaagtgctcctttcgggccaattccggtcacgtttaacagctttgtaaagagcgccttctcctctcttgttgaaaaaccgtaaagcgaaaaagcatcctctctgatatgatggtatgtaaaaatcgtttcctggcttctctccttatatataaagggattcggcgtgaaaatctgatagccgatgccgccgttctctatgacaatatattggggagatacataatcaatcgtccctttaacaaattcaatcacgcaaattcacctctttgactgttcttcattgtaccataaaaacagccaaagtcttatagaaaagttaacatacgttcgcttctctctcattctttcacgaaaaaaaagacatgaattcatgtcttcaatcagcggacgttacccgctgtatgtcttcatatgttcgatgacatcctcaaactccgcttttgtccgaaatggaatgcctttcagcagatttttttgcatatggctttccagcctttctaaatcaatttgaaaaaaagactgaattggttcggaagctggctcaggccgcccatgaaaagtggaaatcactccattatccgatacaccgatatacccgttgaccttgctgagcggagaaatatcgtccatttgcttccggaagagcacatatccctttttttgttccacaagcgtccatccggcataagctgcccaaaaatcatccatagaaaacactttttcatgcttatgctcaatgctgacatcgccgtccaaatacaccttttcaagctgcacatgcacctgcagcggctcatagtgctccacttccgcgccaagtgcgcgggaaggagctcctattaaaaatactgccgctgagcaaagaatgcccagcaaaagatacgccgtgctgaatcgtttcaccctctacacctctttgcacacgtttatgattagtttgaccaaagaggctactgcttaaccgttttatcaaaatttgtctgcacattttccctgacaaaccgttcctccgtatacacatctgtgctttgctcagaaattgtcaagaatcgcgtcagaaaggcactgaaaaaatacaatgccgcaaagatccaaatcacgccgcctgcaccgagcggcccaatgaaaagactcacgatgcccggcgcgataaacgcacataaaccagatcccaaattcaacactgacatggcagcacctttattatcaggtgcaagcgtcggcaaaagcgcgcttaatgggacgtaccctgctaaagccgcgccgtagcagcaggcgataatcatgagcacccaatactgatgcccgatcagctgaggcgtgtaatacagcgccagcgtaaaaataccgcatccgacaccgccaaaccacatgaccgtattgcgccagccaagtttatctccgactgcaccgaaaatgatattaaacacaatattcacaaaaaacagcgtcccccatatttgcagccattccgaaaccgaatacccgtatcgtgctaaataagtaggaagaaagatggcaaatccaaattgtcctatcgcattaatcgtcttgaccactccgccgatgcctaccttagggttttcaaacataattgtaaatgccttcgacaattctttccatttcggctgatcttgtttttgtatcggagtaaatttatctttgttaaaaaataaggcaagaattccgcctgccgccacaaacagtaaagcgctccaaagcgtattgatttctccaaaggccggaactgcatagctggaatagaacgggcccagcacgttaaggccgcacgtaaacataaaccaaaaccagccgacggctttgccgagaatattttgagaggtgctgtatgacacccatacgagaaaagagtatgcaaacagcggatatcccaagcctctaagagcatagctgcccaagagagccggataatacatatgaggaatcgcccagccgataaaagcggccgaaccgaggataaatgcaagcaatccgacagtcatcgtttttctcggcccccaagtttggacaaacgttcctgaaagccaagctgagatggtgacagcaatgccgtacatggtaaataacgatgcggattgctgcatactgagaccatgatcaacgagaaaaggagacagccagccttgttcgaggccgtctccaaccataaagatgacaacgccaatataaccccaaaccatgtgagaaggaattccgattttgttcaaaacatttcctttagcatgtactgtattcattttctccaccgcctacttaaagtatcaatggagtatatacccaagcttgctgaattgtaatcctgttagattaaaaagcgattttttcagtgtgctcaatgctgacaggcatgccaaaagcaagcgattgctgtgctgctctggcgatccttccggcctgtaaaccgtcattgccggtgcagggagtctcctggtttgtgccgatcgcttctgcaaaacggagaatctcctcctcatatgaatccttatagcgttcaaggaaaaagaaatgcggtttatccttcatcacaaaatcagctgttgacacctcaaccgttgtcggcctgctattatcagccgctgcagagcctttcgtcccgaaaacctcaacccgctggtcatatccgtacacagcttggcggctgttatcaatcacagccatggcaccgttttcaaaagtcagtgtaataacagctgtatcaatatcacccagctccgcaaaagaaggattcaccaaagctgcccctttggcatacacttccgtcacttcgcttcccataatatatctggccatatcaaaatcatggatcgacatatccataaacaatccgcctgacgtacggacataatctatattcggggttctgggtcccgggacgtgatttttaataaatgaggtgtaccgatttcaccattttcaacaatcgttttgattttcttaaaatgaggatcaaagcggcggttaaatccgacttgaagtgttacaccgtgtttccggacagccgcaagcgcttcactcgtttcgtccagagagaaactaacgggcttctcacaaaatatatgctttttcgcctcggctgcttctttgatcatctgtgcatgtacggctgtaggagagcaaataaaaatagcatcaatatcaggatcatgtaataaatcacgataatcagaggttatgtattcaatctgatgactgtcggcccagctttttatacggcttgcctgaatgtcagagactgcttttattttcatgtgaggaatccggcttatattttgaacatgaagtttgccgatgcggcctgcaccgataatccctgtcacaatctgttttgtcatggcttcttcccccttgatcattcacgaaagcgctttatttaaaattaatactatcccatttgtaagcgcttttcaagaatggaaattaaacgttctatgtctcttttatcacaattcatgcttataagtagccttcttcttcaagaccagatacactagaattaggctctttttcctgaacagtttatgattttcctataaacagctgcataaaatagagcaaagaaggtgaatgaaatgctgacaaaagcagaggcactggcccataccgtcatataccgcaagaacagcagatttgataaagtcaaagagaaatccgaggaattaacactaatcggcaagggaagaagcgcctatgtgtttgccttaacagaaggcggtcgaaaaatggcgctgaaagtattttttccggaatatcaagcgacagcagtcaaagaagcagcgatctatgaaaaattagccgggtccgcattctatcctgacatttacgaaactggcgattcatttattctcatggaatatattaaaggtgaaaccttttataactgtctgaagaaaggcattgcaatcagtgatgacatgattcagcaggttgaagaagcgctttctgacgcccgggcagccggactgaacccgtcagatattcatttgcggaatctgatattgacagaaaccggggcggtgcgggtgattgatgttgcgagatttgagcagacaaaaacatgcacgcagtgggacgacttaaaatccgcatatcatgcactctacaaaaaaccgatattccccaaaaagattccgggtttttggctggagatcatcgcatttttatataagaaagattggtttcaaaagcatttcgcacagcggaaaagaaaatattcttaaatcaaaaaggcagccgcacaagcggctgcctttatcatgtattttttactttctgacggcagaaatcagtttcatttgttcaggcgacagcttaattcgatagcctctcacagttaagtagaccgcttctgggtccttctcaccggaatgacaatacgttttttccatttctgtctcccctcaccctttattggctttatttcatcttatcattgctttattaaggtagttttaaagaaatgtaaagatcatatgaatccgatatatagtaaaatgagagaaaaaaagggagagagtcacattaagacacgcagcaacatcccgcttattatgtttgccctgctggtcttcttcggcggcgccatctattggatgttattttcactaaaaaacgttccgaaaggcaatctcgtccaatcggttgattcgccggacggcagctatacgttaaacacttatgtatccgaaaacatcttgagcttagatgcagccagaggtgaacttgtaaatgaaaaaacacttgtcaagagaacaatctactggaattacccggacagccgcccagcagtgacgtggatcaatcacaatacagtgaaaatcggcaatcagactttacatcttgatactgatgaaacgtatgattggcgaaaagatgatcattggatccgtgaaaaaccgccgcaggcgtcagtgaggtgatgaaacatgaataagatgaacggaacaaatgatgacaagcatttcaatcattttgtgattgctttatcctttatatacggtttgactgaactaggctatttgttgctgaaggattttataacaattgccataagtttgcctctgtagaaaaacgcagcgtagtcgatacgccgcgttttttctttttcccttcctcttcttattgttaattacaggtcatataatgtgacaaatcgattgtagaaatagttcgattagaccaaaatcctttttatacatgtattcgaatttgaagtgagggggaagcttgatggcagattttgttgctagtttgaatgcggtcttatggagtacgcccgtcatttatattttattgggaattggattcaccttttcaattatgacccgttttttacaagtccgacatttaaaagaaatgattgttcagatgttcaaaggcaagagctctgaagccggcgtttcatctttccaagcgttatcgattgcgctgtccggccgtgtgggcacaggaaacatcgcgggagtggcgacagcaattgcattcggcggacccggtgcagtgttctggatgtgggcgattgcctttatcggggcggcgagtgcctttgtagaatcaacgcttgctcaaatttacaaagtgaaacaagacggtcaatatcggggcggccctgcttattatatagaaaaaggcttaggcattaagtggtttgccgtcttatttgccgctgctgcccttattgcaatggcctttctaatgccgggcgtacagtccaactccattgcggctgggatccaaaatgcattcggcatctctcctttcgtcacagggtgtggtctggttttattattagggttcattatttttggcggcgtcaaacgaattgccaatgcggcgcaaatgattgttccatttatggccattggatatatcctgctgtctttgattattattgtcatgaatgtgtctgaattgcctgctgtgatctcattaatattcaaaagcgcctttgcattggattccgcttttggcggcttgatcggcatggcgatttcctggggcgttaaacgtggcatttattcaaacgaagccggccagggaacaggcccgcatccggcagctgctgcagaggtttctcatccggtcaagcagggactggttcaggcattttctgtttatattgacaccttgtttgtatgttccgctacagctttcatgatcttgtttaccggcatgtacaatacccaggctgcagatggttcctttatcgttcaccagcttaaaggcgtagaagcaggacctggtttcacacaagcggcaattgacagtgttcttcccggattcggtgcaggctttgttgccatcgctttattcttcttcgcttttacaacaattatggcgtactactacatcgcagaaacaaatatcgcctatttagcacgaggcagagaaagcaaatgggcgatgcttggcttaaaactgattattttagccgccacgttctatggtactgtgaaaacagcttcacttgcttgggcattaggggatgcagggcttggcattatggtatggctgaacgtcattgccattgtgctgcttgccaagccggcgctccttgctttaaaggattatgagcgccaaaagaagcagggcttagacccgatctttgatccaaaagcgctgggtatcaaaaacgctgatttctgggagaaagaatacactcatgaaagtgaacgtgtctcctgaacatactaaaaccggcccgatatgacctcgtgccggttttttatgaacgatagtttgtatacacttcttgaacatcatcgtcatcttcaaggacgtctattaatgtttccagcttctcaacagcctgatcatcggcttctgcataggtattgggaagcatggtcacctccgccgaagaaattggatatttcgattcgagggctgttttcacctcttcaaaatgctcaggctctgtgaaaacctcatataggttttcttcaattcgcagctcttctcctcctgcttcaagcacatcaagcatgagctcatcttcttctatttgccattcagtacggtctatcgtaatgaacccctttcgttcaaataaaaaggctacacatccgctttctcccagacttccgccatttttattaaaggctgtccgcacatttgacgccgttcggtttttattatctgttacgcattcaaccatgacggcaatccctgaagggccgtagccttcataggtgatttcttcatagctgcttccgtcttggcctcccgcagcttttttaatggcccgatctatattttcattcggcatattggcgccttttgctttttcgatgacaagacgcaatgctgaatttgcttctggatccgctccgccttctttcgctgccacatagatttcttttgccagcttcataaatattttcccgcgctttgcatcctgtgcattttttcttttttgaatgtttttccacttggaatggcctgccatgttttcaccttcttttacattttctatgtacactttaatgggaattgttcgctgatgcaaagaaaaaggctgccgaatatccttccggcagcccttccttcctagcggttgttcattttatgaagttttctgaacagccctttatctgttgatacttggacgtcacggccatttgcatagttgcgcgctgcttttacgacattatctctgtcagactttgtgaactctctgtggcttttgactgcgataactactcggtcatcggataccataacttgtgtgtcattgacgtttttcacttgtttcacacggttggcaatttttgcagccagtcttctgttttcttggttgtcatacccgttgttcgctgcattccgattcatgtttcggttattcgtgttgttatatgttccgtcagttgccaaaggaacacgatcgtcagcagtaacacggtcacggttatttacattcgtggtgtttcggttaccgtcgttctgatcctccattaattcagaaacaggaccatcgtggtcgattccgtctccctgtctatcggcgtcattttcatttgtataatatccgattggacgggtattgccgttattgcgcgtatcattcatagcattatcgtttgctccgcatgctgttaagccggctgtcattagaatcaggctagcgatcgtcatttttttacccaatggaaaaaccccccgtggacgaattgagcatgtttgctcgcttttatcatgtgcgtatggggggcatgttaagcgtgtcagttctctccatttggcagtgatcagcttgaaaataaaaaaaggaacgatttacatcgttccgaacaatcactcattttcttcttccggccggccaaacatttggtttacagaaggctggttcgtcattggcatagaaactcctgccgaatatgggtttggatttgggttagctgtgccatatggcatattagggcttccataagctcccattcccgaatggccaggcgcagagaaatatggctgatgatcaccgtcacagccgcagtcgtcatgatctttgtatggcatgtaaccatgagccgcagcaggctggtatgctcccattacttggggagtgccgtaataagggccatacggcatatgtccatacggagatccataagccggagatgcgtattgcggcgcaccgtatgaaccgtaatgtccgtgatggctgttttcatgatgctggttttcataacccgggtcatactgaggcgatacaaatcctggctggtatccatgcatcggatgcattggataagcttgtgccggatagtacggatagcataatcctgatcctggaagaattggcgaaacaggcaccggacacggtacgaaatgagccggataatgataataaggctgaacagccggcatcggcatattcggaactgtgtgatgaacgttttcctcttctacaccgcctacctctggcgcctttggcatattaggcatattcggataattagcattttccatattactcatagcctcctgttgtggaaattggtcttgcatatgatacatatgatccatatttccgtcatgatgtttttttggctcctccggtttaggaggcgaccaaggctggaaaagctgtttcatatcataataatcgttcacatcagcttcagggtacacattttcctgcaaattaggcatcggcgggacatacggcatggacttcttttctttcggctttgtgtcttctacatcgacaacggatttaggcttctctttcgcatatggatgttcttgcttcacactcccggccgcaggacttttgcccgcttttggctcttttctgaccgggactccttctgacggcacttttattttcattccaggcatgattaagtctggattgctaagctgtgtattgagttttttcacttcctcaacatcgactccgtacttttcagctattttccagagcgaatcgcctttttgaacgatatggattttcaacgttttcccctcctatgcaaaacgtgaacagttcagctgtgattacaatatgtttcttcacaacatatgcctgaacaaaagaagttatgagtaaaggaagggaaaatatttctgatctacgtgatcgaaagcattcgattcagggcaaggagtgcatcttcctgaatggcttttggcaccttgatgacgcctgaaggttctcctttttcaatttgttccagcgaccacaacaaatgcggcaaatcaattcggttcattgtcaggcaagggcacatgtcagggttgagtgattcgatttgtttatctggatgctcgtgaatgatccgcagaacaagattcatttctgtcccgattgcccacttgcttcccgccggagcctggttgattgtgtcgataatatatttcgttgatccgttatcatcgcttagtgtcacgacttcgtgtgaacattccgggtgcacaatgatctgaatgtcggggtctcgctctctcatatcatggatatttttagtggtgaatttctcgtgaacagagcaatgccctttccacaaaatcactttcacattcgtatgcccggattcagctactaattcatctttcatcggatcccacacagccatatcttcaagcgcaatgcccagatcataagccgtatttctccctaaatgctgatcaggcaaaaataaaattctttttttctgtgtaaacgcccattcaagcacttttttcgcattcgaagaagttacagttgctccgccatgctttccgacgaatgccttgatctccgcagtggagttcacataagttaaaggtatgatcgtatctccaaatatatgctgaagcttcttccatgccctattggtctgctgcatgtcagccatgtcagccatagaacatccagctctcatatctggcaggacgaccgtttgctgctcgcttgtcagcatatcggcggtttctgccataaagtgaacgccgcaaaatacgatataatccgcttctttgtttttttccgctacttgggccaattgcagggagtcgcctgtttggtcagcaaattgtatcacttcatccttttgataatgatggcctggtataaagagcctgctgccgaactttttcttaatggcggcaacgcgcgtttccatatcctttctcgatagttctttataactttcgggcatcatatcattcgattgtttgatcacatcaagaattgacataacggcattcctccacagattcatttgataacgtaacatccatgctgatatctaaacttttgacggaatgagtcagaaatcctaatgaaatataattcacacccgtccctttaaaagcaggcaaagattctaacgtaatcccgccagaggcttcagtttttatatgagccggtgtgagctttgcaaaatgacggaccgtatcaggcggacagttgtcaaacataataacatccgctccagctgcaattgcttcccgcagctgtccctccgtttcaatttccacctcgatatttaccatgtgccctgcggcctgacgggcttttttgcacgcctctaaaatagagccgcatgctgcgatatgattatctttaatcatgatgccgtcatacaaaccgaatcgatgattatacccgccgccggctctgacagcatatttctccagcattctgagccccggtgttgtttttctcgtgtcacaaattttaatctgttcatcatccagacaccgaacagcctctcttgtcattgtcgcaattcctgacagtctctgaataagatttaatacgacccgctctcctgaaaggagcgcagctgcgggaccgtgtaactcggcaatcacttcacctttatgcaacatgtccccatcttttttgtttaaaatgatttgaacattttcgtccaataacgaaaagccttcttttatgatcgctgctcctgcaaaaataccctctgactttgcaacaatctccgcttcacagctctgttctccaaaaatagactgcgatgtaagatcccctgtcccaatatcctcaagaaaaaagtgattcagtaattttttcagctgtaaatgattcattgttccaaatcccctcgttttttctgatcttcgttcctttttttgtatggacaatttgtcttccttgccagcccacctcagtatgaggaaaatcggttcggaagtgagcccctctgctttcctcccgcaaaagcgcagaaaacgtcatcagctttgcagtttgccatagatgagaaagttccatctgccgaattgtgatatccttcacatttacttcctgaaaaggcagcgtatgaagccagatgctaagctcaatcaaactgctttgttcccgcagaatagacatgtggcttgtcattttgctttgcagttcatgcacctctatatccggcacctcgtagaagacactggtttctagccctgattgatattgcctgttataagccggtttttggataatatgctctgctgccctttttccaaataccagcgcttccaataaagaattgcttgcaagccggtttgctccatgtaaaccggagcatgctgtctcgccaatcgcataaagccccggcactgtcgtttctccccagcgattaactgaaacacctcccattaagaaatgcattcccggagcaacaggaatttttccgctgtggatatcaatccctgctttttcacaaatagcggtgatagtagggaaacgcgtttcaaaatcagaaatcgcactgaagtctatataaacgcgatttccttttgccatttcttcgtgaataacccgtgagacaatatctcttggagccaggtcacctaaaggatgccgttcagccataatcctgcggccgttttcgtctactaaacatccgccttcccctctgacagcttctgaaacaagcccgtagaaaacaccatttttcacaagcagtgtcgggtgaaactgagtaaactccaaatccgttaattccgccccggcccggtaagccagagaaagaccgtcacctgtgacagtgagatcattcgtatggtgaagaaacaggtttccacagccgccggcagccagcacaacttcgtctgcgtgccttaccttgagccgccctttgctgtcttttgtcatgacgccgatacatcgtccgtcctctataagcaaatctgctgccatttcattctcgattaacttgattttgctgttgatccgtttgagcaaataatcgataagcagcctgcctgttgcgtctccgcctgcatgaaatatgcggttgtatgagtgggccccttctcttccaagacaaacaccgcctcgttcattgcggtcgaatggaaatccacgctccaataggctttgaaccatcatttttccatcatgtaatacgtctgctgcaatagctagattattatggccgcatcctgcgtataacgtatcctccagatgggcttcaatcgagtcatcttttgcataggccgcagcaatcccgccttgtgcatagacagaattgctgtttttgacgcttttttttgtgataacagtcacttcgtatgagggcgggaaagctgcagctaaggaaagtgccgccgcccctgaaccgatgactgcaatcgtctttttagacatatgccatcctcctgttgtttacacctgtcttgacacctatatttacacaaggataaaataaactcaagagttttttatggagaacggatggaggaagaccggatgatttatttagattatgcagcgacaacgcctatttgtgaggaagcccttactgtatatcagaagcttagtatggatatgtacggaaatgccagcagcctgcatgatgcaggaggaaaagcaaagcacatactggagtactgccgtgaaaaaatcgccaacatcattggcggagaagcaagcggcatctattttacaagcggcggcactgaatccaattttctggccattcaatcattgctaaacggcctgccaaaaacgaaaagacattttattacgactgccatggagcatcagtccattcataattgcgctgcttttttggaacagcagggatatgatgtaacagtcattgaaccgaatgaatacgggcttattaccgaggaaatattactagcccatatccggccggaaacaggccttgtatctattcagcatgcaaattctgaaaccgggatcattcagcccattcaccgcctgtcttcatacctgcacaataagggcattcttcttcattgcgacgctgttcaaacgtttggaaagatcccgatcaatacaaaaaatctgggagtagatgcactctcaatgtccagccataaaatccacggtccaaaaggagtaggggcggtctatatccgtccggatgtcccttggaaacccgtttatcctctgactactcacgaatacggattcagagccggcaccgtaaatgttcccgggatcggtgccttcactgccgctgcagaattgatcgtaagcgaaatggaaaaacagatatcccgcaatgaggcattaagaacttactttctagaccaaatccgtattcggtctctccctgtaacccttgcggcagacacttcgcaagcagaatgtcttccgcatattatagggtgtttttttcactcatttgaaggacaatatgttatgttagaatgtaatcggagtaatatttgcatttcaaccggcagcgcttgttctgcaggttaccacggtccgtctgaaacaatgaaagcattaagaaaaaccgaacaagaagctctgcaatttatccgcatctcttttggcaggcatacaacagctgaacagctggaacagttattacatacgtttacagtgctttgggaacaaaagaaaggagaatttgatattgaccgaagaattaaagctaatgggcgccaacaggcgtgaccagcttcttctgtggctgaaggaatctaaatcaccgctgacaggaggagaactcgcaaaaaaagcgaacgtttcaagacaggttattgtacaggatatatcgctcttgaaagcgaaaaatgtaccgattatcgccacaagccaaggatatgtatacatggatgcagccgctcagcagcaccagcaggcagaaagaatcatagcatgtctgcacggtcctgaacggacagaagaggaactgcagctcatcgtcgacgaaggcgttacagtaaaagacgtaaaaatcgagcatcccgtgtatggagatttaactgcagccatccaagtaggcacccggaaggaagttagccatttcattaaaaaaatcaattctacgaatgctgcctacttatcacagctgaccgacggcgtgcacctgcatacactgacagcacctgatgaacatcgcatcgatcaagcttgccaagccctcgaagaagccggcattttaattaaagactaaaaaaagccctctagagggcttttttataattggtaagactggtatgcacccaggagctttactttgcagccgagcgcttcaagctcctgcatggcccctggaatcaatacatcatcaaacgctttctcaatatcaataataaagaaataatggcctaatccggttttagtcggacgtgactcaatttttgacaagtttaaatttctccaagaaaatgcagacagcactctatgcagcgccccggactgatcatcctgcggcagcatgaccattaaggtcgttttgggcctagaactcaattttgaattcacttcaaaagatatgttttcatcaggagacaggataacaaatcttgtatgattgtccctataatcctgtatatcccgtttcacgatttttaattcgtatgtagaagctgccatatcattggcaatgaccccgatattcagctctggatggtcactgacaaactttgctgccgccccggtagaattggcgtattcatatggaacggaaggaaaatgtcgatggagaaatttatggcattgcgcaatcgcgtgtgaatgcgagtaaattctgtcgagctctttccatgcattctctcttgagggatgaacgagcaagtgctgatgaatcggcaacgtcatttcacccacgattggcaagggctgttcatgtattaaatagtctattgttagattaacagatccttctaaagcattttccaaaggaacaaaagcaaaatcaacttcgcctgcaacggctgcatctatacactccggaatggtgcggtaagcaacatgttcggcgccgttttgaaaacaagaactgactgctagatgtgtaaatgtagctgctggacctaaataaccgactttcatgacgattttctctcccttatgcacctgaacctaatatttcaaccttttctacaaaatcaaacttcctgagcttattcattaatgtatgaatgtcttcttccattgccgacgtactgatagacagtgtcacatttgctctgccttgaagcggaatggtctggtgaatggaaagaacgttgcttccagaatcagctaccgcctgaagaagctgagataacgcacctgacctatcctccaaatgaaagaaaagtgtgataatttgttcttttaccatggtgtagaatggaaaaacagcatccctgtatttataaaacgcacttctgcttaaatcgaccttttgaacggcatctgctactgaatctgctttttttcgatcaagcagctttttgacttctaatgtttttctcattgcatcgggcaatacatcttcacggacaagataaaatgtctcctctttcatttgcatcccccctttaaaatagagagcctggcaccaggctctcttttcagccaacattcattaatcaataaattcaaattcaaattccagaagcctgattatatctccatccttggctccgcgttctctgagtgcttcatcaacacccattccgcgcatctgtcttgcaaaccgtttaaccgattcatcacgtgagaaatcagtcatcttgaataaccgctcaaggctgtctcctgaaagcacaaatacaccgtctggatcgcgtgtaatgttaaatggcacttcttcattttccatcgtgtacatgacacggttttgtgtaagctcttcctcgtcatacagcgggaattccggtgtgttctcaagctgattggcaacctcaaacagaagctcacgcagaccttctcttgtcaccgcactgatcgggaataccggataatcatccgtcagcttttctttaaaggcttcgagattttccgcagcctccggcatgtccattttatttgcaacgataatttgcggacgctcagtgagacgcagattgtactcgctcagctcctggttaatcgtaagataatcctcatacggatcgcggccctctaagcccgacatgtcaatgacgtgaacaataaccctcgtccgttcaatatggcgcaaaaactggtggcccagtccgatgccttggtgtgcgccttcaatcagtcctggcaaatcagccatgacaaagctgcgtccgtcatccgtttcaaccatgccgagattcgggacaagcgttgtaaagtgatagtccgcaattttcggttttgcagatgagacaacagacagcaaagtcgattttcccacactcgggaacccgacaagcccgacatccgcaagcacttttaattcaagaacaatgtagcgttcttttcccggctcgccgttttctgaaagctgaggcgcgggattagccggtgtagcaaagcggctattccctcttccgcctcttccgcctcttgcaatgacagcccgctgtccgtgctctgttaaatcagcgatgacctgttttgtatcatcgtctgtcacaacggtgcccggcggaactttaataaccatatcatcagcatttcgtccgtgctggtttttggacatgccatgctcgccgcgaatcgctttaaagtgttttttgtatctaaaatccatcagggtgcggagaccttcatctacttcaaaaacgacgtctcctcccttacctccgtcaccgccggcagggccgcctttcggcacatatttttcacggcgaaacgcaaccataccgttgccgccgtcgccgccttttacatatactttgacctgatctacaaacataatgtcctccgttctaaaccgttaaaaactccgctagtccaacccaatctcaatcagacattcgtgactcgtgatttcaaaacgcatgatatcaacgtcctcatatccattctgccgaatatcatcaaaagcagatggatcggcaaaggcgccgtgaaaatcaaggtacagaatcagctgtctgtcaggatgatccgtttgaagcgaaaccgttaaatgattttcactctctctgctgactgcttgatcaaacagatgaaacagctttctcatcagtttcgccagcttttgatcataagccgacaaatccttaatttctccgagaacttcatattcaagcgtcatataatgggttttccaattaaacgtaagaaaatcaaacgccaaatgcggtgttttcaggtttgagagctttgattcgtgctttgcgtctataaccatttcttcaatcatttcaaagacgcggtcatacttctgcaagcttaagtttcctttaatcagctgcagcttattcatccaatcatgccgggaatggccaagcagatgaatcagttcgtttgttaatgccgtgtcgcttatattttcttcttgattttttgaaacatccttcattttcgcactcccaatcatttaatttcttatttaggagtctgtataagtgtgtattatgaattataacagagaaggctttgttagaaaaacaattgtttttcccagaaatatcatgttccttttttctggctttggttgatttgcagccaggcagaacattttatgtattactgcttggggaacatatccagtgggtttgagatgtttattctcattcttggcggggtctgctcgcacatactctgcatttcattctaggtgtttactccgcatattgcaaaaaaaactccagtcatcatcgaccggagttttttgaatcattattgagctacaggatatacgctcacttttttgcggtcacggccgaaacgttcgaatttaacagttccgtcgattttcgcaaatagagtgtcatctccgccgcggcccacgttttcacctgggtaaatttttgttccgcgttgacggtaaaggatagaaccgcctgttacgaattgaccgtcagcacgtttagcacctaaacgtttagcctcagagtcacgtccgttctttgtagaacctactccttttttagaagcgaaaaactgaagatctaatctaagcatgtagctcacctcctatattatgtttgtggtcacacgcaagttgtctttgtaatcccgttcgattgtctccagcgaaacaatcatgccttcaatcagcaactgagctttttggcgtgcctctggatcaagagattcagggaattcaaaataaaaataacccccgtcctcccctatatcaagaagcggctcgaagcccgcgagcacaatgaccgcgttaacggctccaaacacaacggctgtcactccggcacaaacaagatcttgtccatgttcagcaaaattcgcatggcccgtcatttcaaaagacaatatgcctttatcatgagacctcctgattgttgcctgaatcatgcttacgcgttgattttttcgatcgtcactttagtgtaaggctgacgatgaccttgttttttatgaacgtttttctttggtttgtatctgaaaacagtgatttttttcgcgcggccttgtttttcaactttagccgttactgttgcgccttcaactgtagggttgccgactttcacgttgtctccgccaacaaacaaaacgtcttcaaaagtaactgtttcacctgcttcagcagcaagtttttcgatgtaaacagtttggccttcttcaactttgatttgtttaccgcctgttttaatgattgcgtacattctctgcacctcctattagactaagactcgccagataccagggggctgtaaaagctcttaacacctgtactgagcggttgtagcaatggtgctacatccataacattaaaaaatataccaaaatacaagccgtttgtcaatcagttttagtagggcagaagcagttcctccatggaagaattcgtccgcttatcggcaaagtaagcgtgcagcacttcattctcgtcaagctggctgagcttttggcctgatttttctataataatcggatgcttacagccacgtttgaactcggccatcacatgatagactttatcctccgcctttactgtcagcggcagaagtttctcaagctccctgttttttccgtaatacctttcgaggagaaatctcacatggatatagtgcctttgccgatattcctcaaacaaggaaacagccagaaagacaaacaaaacccatgcgctgatctgcagaggaatcacgaataaaacccagcacccgagcaacaggcagaagcagagcgacgtttttagattaagccggtgagccttttgaaaaggcagctgtttggaaaacaacaaaaataacagttttcctccatccagcggccagatcggcagtaaattgacaaataagatagaaagattataaaaggtgaagagttcaaaggtatgctgatgaatcactgagacttctgcaagcatccaggcggcaaactgaagccagatgtgctgaagagggccggcaataatgaccgcaaactcttcctttaacggccgattcccgtgttcttccacttcgaccgttcccccaaacggcagcaaaaaaacacgcttgattctccaagaaaaaaatacggccagagcagcatgccccagctcatgaatcaatacaatcaggagcagacataataatgctttcatatggcctgtgagcaagcccagcgccgcgataatccaaagaaaaggatgcacatggatctttaagataaggtcgagccatttattcaaatgtaatcacctgaatcggatcaataaatttatcgccgtctttcatggcaaaataatagacccctttattatgatcatcaagcttaatcgaaccgagctttttgcctttatccacaaaatcatataaagcaacatccacatctttgagctcgccatagatactataggtgttgtcagcatgctgcaccttaaccgtcagtcccgtctggctgtctttgctgacttcaaccacatagccttcttttacactatcaatcttatcgctgcttgtttcgactttaattccttccccattgtcctgaaaatcctgctgtactttcccggatgcaggcgcgatcagatctttgcctacttcaatctgctgttccttatttttgtgttcaggagccaggaaagcaagcggatttccgaatttggtttcgaaccaatggcttgctgaagcaaattgaaattcagtttcaaaggttttggctacggcgggtttaatctgactgacgggtccaatgtttgttttataggctatagctgaaacgagaacaaggcaggccgacagaagacatttcaggataattgaatctgttttcaccaatgggtgttttccgttgaatgttggcatgttatcttcgtagaccggaagtgttccatgcttttcctgatccgttaccatcacccaggacgggggtttctgcttttcagaaactgtctgagtagagaaacgttttgagccggaaagctgctttcttcttttctctaatcgttttctgatttcatctgctctgtgactcattgccatcatcctttgcattcgttgggtttgtacatcatatgtcttgtccatggcaaatattcggtttagtcaggaacaaagcaggcaaaaacaaaaaaacctgacacagcatttgctttgtcagattcttctctttaattctatcacattaagatcttacgccgaaaaatgacttaatcttagccatcattcctttattttgctcttcaagcacctgtaaaggaacagattcacctaagatgcggcgggcaatattgcgatatgcaatagaagcgcgatttttcgggtccatcgcaatcggttcaccatggttggaagctttgatgacttcatcatcatcagccacgattcctagcaaatcgatcgacaaatgctgtacgatttcgtcgatatccatcgtgtcaccgtttttcatcaggtgatttctgattctgttaacaacgagccgcggcggttcaatattttcctcttgctccagcagccctataatacggtcagcatcacgaacagctgagatttcaggcgtagtgaccacaatcgctttatcagctccggaaacggcatttttgtacccttgctcgattccggcaggacagtctatgatgacatagtcaaattcctgtttgagctcttggaccatgtttttaatttgttcaggagcaacagctgtcttatcgctcgtttgagcagcgggcattaaatagagcagatcatcgaaacgtttgtcttttacgagcgcctgatgcattttgcatctgccctctacaacgtctaccagatcgtaaataattctattttcaagacccattacaacatcaaggttgcgcagtcctatatcagtatctactaagcatacgcgcttccctaaaatggctaaggcggtaccgaggttcgcagatgttgttgtcttacctactccgccttttcccgaagttattacgatagcctcacccaattcacattcctccctcaagccttgttagatcaggtcttaaatgagccaaatgttgaaggcgttcaatgaccatatttccgtctgtatctaaataagcacattccatttcgttccctttttgaatgtggtctggggagcgatttaacacatgattgattcttaattgtgtcggaagcatttcagaggcggcgatgaccgcttgattatttccattaaacccggcatgcgcgattcctttcagtgagcccagaacaaaaatgttccctccggccctgactgttccgccgggattcacgtcaccgatcaggagcaagtcgccttttacctgcagcacttggcctgaacggacaatttttgaaacagaaataatttcggcttcctctcttatctgctgtgcttcttttttagtaatgacttcactgtcaatagaatgaacaaacaaatctttctttgacgcaatcaattcggttagctgttcctcttgctccttatataaaaagcgatttcccagcttaacatgaacgctgattttctggccttttccatcggtatattgttcaattgacagcatattctgaagaccatcgagaagctcatcaaaagaacacgcatcatccagatgcaatgttagtccattctttgttccttttattgttacatattgctgctttttggtcttcacaatattcacctcaacaacatactcatttcgtcaaaaaaagataaaatcctttttactcatctctcaattctttctttagactcataaaaaacaatctaaatggcagaacaagaataagagctgctgcaatatttaataaaattgtcggtataaaccggtcaagcacaaatccgttaaacgtcataatatctttatgaatcaaagactgaatgccgaatacgtaaaattcgagcagacagacagccagaactgctatcaatatcactacaaatgcgtttgtatgtaacactttaaacgcttttgaagccaaatagcatagccctgcaaaaccaaacatgtaaacgcctaatagacttgtatagttcatgtcatatagaaaaccaaaaataaatccgtaaatcatcgcgtgtttttggttgataaaagccgacatgaatatcaatacaagcatcaaaaaacgcggggcgagcacttggtcatctgtaacgaaaggaaaatgcaccaaatctgtaaaaatgctttccgcagaaaaaacaagcatcataacgaaagggagaaggaaacgtttcacgatccttcctcctctgtatcgacagtcggcacgtcacggttaacaacgatcacattatttaaatctgtaaggtcagccgcaggttttacataagcaacctttgtcagtccataggaatctgactcgatatcagtcacttcaccgattgtcagcccttctgggaaaacaccgcctgtccctgatgtttcaataagatcgccttttttcacgtcttgtttatccttacgctcaataattgtcatcttaagacgttttttctctttgtcatatccttcgatcaagccgtagcctttgctgcctttttttccggaaatttttgtcgcgactctgttattgcggtcagtatcgcttaaaagctgaacagcagacgtaaaattgttaagtccggagcttttgatcttgccgattaatgcgcctttttcgtttgtaacggccatatctttcgctacgttttgctgagtccccttgttaatggtgacctgtttggcccaattatcagggcttctggcgatgaccgttgctaaaatcggcttgtaatctttaatcgatttgacatggccaagctcgtcacgcaaggatttgttttcttcttcaagctcttgaagcttggcttcatattgtgtctgtccgtcaagtttttctcttagacgctcgttttctttgtatgtgttttttaaatcattgatgttctcaaatattcctgcaaaaaattcggcaggcgtatgaaaaatattttgaaatactcccgtcgtatcgccgatcactttctcaggccaggtggtattgcggccgcccttcagcgaaaatccaatcatagccaccaatatgataatacacagaagtaatagcattaaccgcttattcggcatcgtgttacacctcttctattgaactcccgattatctagttttccctttgaaaagatggatgtgctccagtgctttccctgttccgatcgctacacaatcaagcgggtcttcggcgataaggaccggcatttttgtttcttcgctgatgactttgtctaaattgcgcaaaagcgctccgccgccggttaacactatacctctgtccatgatatctgctgcaagctcaggcggtgttttttcgagtgtgctcttcactgcttcgacaattgtagatacagtgtcgcgtagagcattagaaatctcttttcctgtaatttcaattgttttcggcagacctgtgagcaaatcgcgtccgcggatttccatgttgtcggattcttcaggagcttctgcagatccgatttccattttaatcgcttcagccgtacggtcaccgatcatcaggttgtacgtttttctgatgtagttgataattgcgtcgtccatctcatcaccggctacacggattgactgagacgttacgatgcctccgagggaaataatcgcaacttctgtcgtaccgcccccgatatcaacaaccatgcttccagtcggttcccaaactggcagattggctccgattgctgcggcaaaaggctcttcaatcggatacgcgtcacgcgctcccgcctgtcttgtcgcatcgataacagcgcgttcttcaacagctgtaatgcctgatgggacacataccattacatatggttttctggcaaacatgcctttattttttatggcttgattgatgtaatatttcatcatcgtcgccgttgtttcataatcagcgataacgccgtctttcatcgggcgaagagccaccacgttgcccggtgtccgtccaatcatatttttcgcatcatttccgacagcgacaatcgatttcgtatccgtctgcaaagcgacaactgacggctctctcacaacaattccttttccttttacaaaaacaagcgtattcgcagttccaagatctataccaaggtctctagcaccaattccaaacatatgtatgtatcttcctttcttaaagcaaaaataccctaaagggaaaaactcataaactctattatagcttaattcgacgaaaaaaaaagtgttacaaatatcctttttcctttaaactcacaaattttttatccccgatcaccaaatggtcaagcagctcgatgccaatcaggtttccgcattcaaacagccgtcttgtcacttcaatatcctccctgctcggcgtcggatctccagaaggatgattatgaacacagataaaggaagcggcagatcgtttaaacgcttctttaaacacctctcgcgggtggacaatagatgaattcaggcttccgataaatacggtgcgtttatggatgacttgattttttgtatttaagtataaacagacaaaatgctcctgggttaaaaagcgcatatcctccatgacgagattagcgccgtcttccggggagcgaataacgaaatgttcttcgttggctaatttgtgaatccggcttccaagctcaactgcagccagtatttgaatcgcttttaccataccgattcccgggatgcttgacagctcttcaaccgatgcttccttgagcagacgcagcccgtcaaatgagcgcagcagccggtttgacaggtccaaaacagattcgtgtttagtccctgtccgcaataatatagccaaaagttcatgattcgctaagttctcggctccgactttcaggagccgttcccttggcttttctttcattgggaaatctttgagttttaatggcagatcgcgtatgaccaagcactccttttctttcccttcccgtttatagaaccgtcatgcccttatatcaaaatggcgaagagctctcattgtttttgatataggaaggcccatgactgaataataatctccgtctattttctttacaaaaagcgcgcctcttccttggatgccgtatgcacctgctttatccatcggctcttttgtttcaatatatgtccaaatctcttcttcactgagggaccaaaacgcaacttctgtcttatcataaaaagtctcgctgtgattttcagcttgaatgctgaccgcggttattactgagtgacttcggcctgaaagcctccgcagcatagaagcagcttcttcttgatcctgcggtttgccaagacattcgccgtcaaggcataccattgtatcagcaccgataacgattgcatgcgggtggagatcagctacagccttagctttttgttttgccaaccattggacgttttcttctggtgaaaagtttcgatttaatttttcttctacttcactgacaataatggagtagggcagctgtagaagatcgaggagttctttcctgcgcggagattgtgatgccagtattagcggttttgtcatgttcgtcatcctttcagggtttgcttaagaaaaaaagatactcgtttatcctaccaaatcacgaggcttgtcacaatttcagaaaaataactttttcatgacaaaataaaaaaagcctgtcactaaaggacgaaggctcagggcactatctcttattttacgacggctaacagctcctgctgagccttccacccggcttcagcacttggatcctctaattcctttaaagcctgcaaaatcgcttttttctctcctgtttctgacgcttttgtttcaccaagcgacttttctattttctctacactcgcttttgtaatgtcttcgccgagaatcgcctttgctgcaagctccgctgtttccttaaaagaatctgtcatatctgactctattgataaggaaagctccttgcctccccaggcttcaaaatcactgtcgattaaaacctgtcctaactgctgtgagacatccttatcactggctaagcccgcgatgacatacgtatacccgtcatcctttgacagtgacacggcggaatatcctttttcggtcaattgttctgttaacgtttcggcgcccttttcatttgaaaattttccggcttgcacagcgtatgttttgtatgtaccttcagtttgtgcttgtttttctgcgtctgaggtttgtttatcagcagaagtatcccctgcttttgccgtttggctgcctagagaatcctctaaagaggccggtgctgacgcttctttattccccgatatgtttaacgcgaataaccctaatccagtgccaatgacagccgcgaaggcaatcgtcgcagccactctttttactggtttggcagtcccggtctttccttttgcataagactttgtttttttcttttgataaggaggaacaactttagggtcctctttaaacaccttgtccccctcggaatcccaattgaattcatcttcatcagggtgttcctgggatgccgcaacctcttgttctgcctgtcttttttcctcccaatttgaaaatgtcatgcttctatctgcctctgtatcaggtgtctcttgttcgtaaaccgtctcttcttttccattaatcgtcaccttgagggctttttctgcggctttactgttttttttattctttctttttttcaattccgcttcctcccttcatttgcttgaccgttcttgtcggcttttcatgctacacactttagcacaggcaaagaaaaaaagaacaagacttttgtcgccttgtccaaaaaacgttcgtcaaatttttcagcagtcagcccaatgccattttgatataaaaagaaatgatagagtcaccgtataaataggctaaaatgctccctgcggccatagcgggggcgaagggaagcggctgccttttagcgagtctaccagtcagaacagctgccgctccatataatgcacctatcaaaactgaaaagaaaaaggcagctgccagcattttcacaccaagcacaaagccaatcaccgcaaataatttaatatctcctccccctactcccccatgggtgattgcggcaattacagccagaaatagaaatccggctgccgcacctagcaggcctgcataccaggaatcaagcggagaaatcaatctcgcggccgccaaaaagggaagaaagaaaatcaatattcgatttggaatcagcataaaatgaatatctgtcactgcaacaataatgagaagagagataaacaccacagcgggaaacagttccagcgatgtgccaaagcgtattcctgcggcagcaaataaacacgctgtcacaagctctgctgcgggatacataaaagaaatcctatgcccgcagcttttacatttacctttttgaaataggaatgacaggatgggaattaattctgcaggagttaatgtccgccggcaaaacgggcatgatgaacggggcgcaataatagatagatgtaaggggatacggcacccggccgtatagtaaaaagaaccaaggatcagcccaaagataaaaagaatggatagcatagacaacacacctttactcattgagttctggtatggattgtagcaaaatggacatcctgagctccaattgggaatattcaattttacacataaaaaaacggcagaatcttttttttgattctgccgagccggatgcttttatttcaacctttttcgaatgtcagaaataaagtaaagagatccggtaatcagcacaatttcatttgagccctttttgctttctatgaatttgatcacatcgtctggatcttcactccagcttttattgctgatttcacttgcatcatagagatcttttgcaagagaagcacgcgggaaatcaaaagaagcaaaatgcatcgcatgagcaatggtttccagtcttttaatcatgttctgatacggtttgtcctttaacgcgctaaacaccacagaaatgcgtgaattggcgaaacgctgcttcatcgtttccgccagcttttcaacaccttcttcgttatgcgcaccgtctaaatataccggaggatgctcctgaacaagctctaaccgtcccggccaagcagccttcacaagcccgctccttaacgcttcgtcactgatatgggcgatattctccttattgagccactccgcagccaaaatggacaaagcagcattttgtctttgatgggtgccaatcagagatgtccgaatatcttcatagcatttctcttccgttttgaatgaaaactgttctcctgcaggcagagcctcttcattgaaaataacacatgcatcatgcaatgactggaacggcgcagcatgccgttcggcttcatggcggatgacctgtaaagcttccggctgggtaactgctgtaacgattggaataccttctttaataataccggccttttctcctgcaatttcttcaatggtgtttcccaaaatattcatatgatcgtgtccaatgcttgtaatcacagttaagagcggttcaaccacattagtagaatcgaatctaccgcccaaacctgtttcaaaaataacaaaatcgaccttatgaaattctgcaaaatataaaaatgcacaggccgtcataatttcaaattctgtcggctgtccgtattccgtttgatcaagggcttcaacgtgcggtttcatttgattgacgagtgctgtccattcctcatctgaaatcggtatcccgtttacgctgatccgttcattaaacgtaataatataaggcgatgtaaatgttccaaccgtatatccggcttcctgcagcatagaacggataaaagcgacagttgatcctttaccgtttgttcctgcgacgtggaacgctcggatttttttttcaggatgtcctaaccgcgccatcagctgtttcattcggccaagtccgggcttcaccccgaatttcagcctcccgtgaatccagctgcgcgcatcttgatatgcagtaaacaatgataatcccctcttttataagacaaggcggtttctctagaaaccgccccggcttttcattaacccttcagctcagccattcgtttttgaacagcgtcacgcttcgccacataatctttttctttttcacgttcttcatcaattacgtgtgcaggcgcttttttcataaatccttcatttccaagtttcttttggacacgctcaacttcttttgtcagtttatcaaattctttttgcagacgggcaatttcttcatcaatattgattaagccttcaagcggaagaataacctctgctcctgagacaacggccgtcatcgccttatcaacagcctcaatatcggtgccgattttaagcacactcggattcgtaaagcgttcaacatatgaacggttcgcttcgaggcgggctgctatttcgtctgtgcttgttttaatgtacagttcaacctgcttgctcattggcgtattgacttcactgcggatattgcgcacagaacggatcagctcaacaagaagcttcatgtcagctgccgcttcagtatcggtatgctccggcactactacaggccattgacttactgtaatcgattccccttggtgaggaaggtgctgccaaatttcctccgttaagaatggcataaacggatggagcagacgcatcgtttgatcaagtacgtaagcaaggatggaacgggtagttttcttagccgcttcgtcttctccataaagcggaagcttcgccatttcaatataccaatcacagaaatcatcccaaataaagttatataaatggcgtcctacttcaccaaattcatatcgatcagcaagctgggtcacgtgctcgatcgtttcatttaatcgcgttaaaatccacttgtcagcgactgacttttcgcctgagagatcaagctcatcgtacgtcataccatccatattcattaatgcaaaacgggaagcgttccaaattttattggcaaaattccaggtcgattccactttttcatagctgaagcgcagatcctggccaggagagcttccagtcgcaaggaaataacgcagagaatcggctccgtacttgtcaatcacatccatcgggtcgacaccgttgccaagagatttactcattttccggccttgctcgtcacggattaagccgtggattaaaacatctttgaacgggcgctcgcctgtaaattcaatgccttggaaaatcatgcgtgatacccagaagaaaatgatatcgtaccctgtcacgagaacatctgtcggatagtagcgtttaaagtcttcagcagttacatcaggccagcccattgtggagaaaggccatagcgcagaactgaaccatgtatccagtacgtctgtatcctgttcccaattttcgctgtcttccggcgcttcaagcccgacatatagctcgcctgtttctttatgataccaggcaggaatacgatggccccaccacaattgacgggagatacaccagtcgcggatgttttccatccagtgtaaatacgttttttcgaaacggtcaggcacaaagttgaccttttcttctttcttttgcagctcaatcgctgcatcagcaagcggctgcatgcgcacaaaccattgtgtagaaagataaggctccacaacagccccgcttcgttcactatggccgacagagtgcatatgatcctcgatcttgaagagaactcccgcctcctgtaaatctttcacgagctttttgcggcattcaaaacgatccataccttgatattggagcgcattttcattcatcgtgccatcttcattcatgacaaggatgcgttctaaattgtgtcggttgccaagctcgaagtcgttcggatcatgagcaggcgtaattttcacggcaccagacccaaattccatatcaacatagtcatcaccgacaatcggaatttcacgatttacaatcggcaggatcaccgtttttccgataaggtgtttatagcgctcgtcttcagggtgaacggcaacagctgtatcaccgagcattgtttcaggacgtgtcgtcgcaatttcaattgagcctgaaccgtcagcaagcggatagctcatatgatagaatgcgccttgaacatccttgtaaatcacctcaatgtcggatagggctgtttttgtcgctgggtcccagttaataatatattcgcctctgtagatcaggcctttttcataaagcttaacgaatacttctcttaccgctttgctcaagccttcatccagcgtaaaacgttcacgggaataatctaggccaagacctaatttcgcccactggctgcgaataaagtcagcatattcttccttccacttccacgtttcttcgaggaatttttcacggcctaaatcgtagcgggatttgccttcttcacgaagtttcgcctctactttagcctgtgtcgcgatgccggcgtggtccatgccaggaagccacagcacatcatagccctgcatacgtttcattcttgttacaatgtcttgcagcgttgtgtcccatgcgtggccaaggtgaagtcttcctgttacgtttggcggcgggatgacgacagagtatggctcttttgtctggtcactgcccgcttcaaaaaatttgccttttagccaaaaatcatatcggtctttttcaaccgctgccggatcatatttcgtcggcattgtttgttcattcgtttccatcataaccctccagcatgtttaaaaatggctgagaacgaaaaaagagctcttcatccctgtaaaaggacgaaaagctctttcgcggtaccaccttttttcatgaactctatcagttcatgcacttataacggataacgggtgtttcccgaatttctctactcttctttcaagaaattatgctcccgggcgaccttccaatcagacaacataagaagcctttcagcaaacggcttctctctctgcatgcgccttttttgtactcttcccgttctaagcaggtgtatttatcagctcattgtacattatttatgttctttattatagtaaaagtgtttttgattcgtcaatcatcttttccaaaaacaccgctttctatacagatgggcaggcacctattgcccaagtttacatatgatgcttgtaaatgcgtagaggaggatgcaccgtgaagaaacgtttcagctcttattcgctgccgccatgggtaaggcaaattcggcttgtatccgcacaagtgattattcccattacgatttttcaaggaatcagaaccattttctttccgacaacctttgatgttttgctgctcgcaatcctaatctttttagcttgcgcccttcatttagaatggatataaacaaacaagtccgcgccattaagacgtggactcgttttcagcctgaaattttttctcttgttcaatctgatgaattttcatcacaaacggctctatatttttcatttgccaataagcctttaataattgtgtacattcctctttttcatgctgtcgtttcccagtttgataaccgttcagcaccttgtacatggctgccggatatgccatatagctgagaaaaaggctgacttccgcttcacgcaaagggaatgatttcgtatatccataaaaccattcgacgcattccggacaagctttcggaaagcctctgaacatttttgtataaaagccgagcaggtcgttttgcggaggaccgacagatgctctttcgaagtttgtaaaatatccggtcccagcatcattatacagaaaatggtgtatagacaggctgccatggttcattacaacccttgaaacgtccttttcctttgcagactcataccagtcctccagccgttccagcgcaaagttcaccgcggaaatggtttctgaaaaataggttatggcctggagttcaaaaggagaaaggtaccattccttctccgctctatccacaaactgctcatagaaaattttatcttgttcccacttttttttcgtttgcccgtaataacgttcaatctcatcacgtctaacctttagttcctgcgcggttctctcgtgaagacgggctgtttctctaaataaataagcatgtttctgatcccgttcttcctcttggtcaaattggagccaaggcattaaatagtaggtatctccgtattgtatgcctgctgagaaaaactcaccgctatttgttctgtaaacgggaacgaatgaacgaaagcctttttcctcaatcgccaccatatgatctgtaaaatgcttgccgcgaccttctttcaattttttcagggcaaatatgccgtagtctgtatacactttccaaacaagaggactgacaggctcaataaattgagcagtcagtccgtattcctgaagaaccgattgggtatcttccatttcattcaccacattttccgatcacttacggtttacgcatggctatttttatattgaggaatatagagaatctgtcctgcttttaattcatcatccaatgctaaagaattcatcctgatcagctgctgggatgtaatttcataccgttcgcataaacgctcgatcgtatcttcctgctgcacaatacaaattttcattctcgaaaactcatccgcttcttttgtaaagagttttgttaaataaagagaattatcactttcctttgtttgaggttccttcgtttcagcagcaggagcaaccctaggaacagcatccgtttccttcctttcagtctcagaagattcaggcagctggaaggattgaaaaggtgtttcttccttaggctcttcaggtgatggtgtttttctcacttcaatttcgaagctctcttcctcttgttcttcctcctccagcagcttaggcgctgaataaaaagaatcctcctcttcttgttcagacaggaaggtacggtatgccggttcaggcaattcttcttgagatgcctcctccgagcttgttttttgattgaaatggaaatgtaaatcggctttgtcattctccacatatgcagctgaagctgtttctctgctatcttctatggagagagcagcctctgatacactctccaaagcttcatccgcttccgcctcttcttggcaaagcgcaggatcagcctgatccgattgagctgcttcttcattttgagcctcttggcgcagcgcatattcatgattaggagacactgttgtttcctctttttcctttgcaatcacagtctctgaatgaagctcagcttccaaagcaggcgattcttctgctccagcgtgttcacgaggctcagtctctgctggagagtctgcttcttcacgaacatccgctattgcagctgccggctctgccgtttctttttttgctttaacgatctcttgaatctctatttctgaaggatcaggttctggctcagattcttctgtttccgattcagcacgaacctccttttccgcagcaagctcttctgactcttcttcctctttcacatcttctctggcctctggatctgaagcaaccgattcaggcggctcagattctgctttttctgtctccagttcttcacggagccccgctttcgagataaaaagttctggcggttcggctggcggttcatgctgaagaactgcttcctctgccgatgatgcacccggttcttctactacactatgtgccggcggctctgaaagctcttcctccctgaatgccgcaggagcttcatataaaggtatctccggctctttgtcttgcgtatcgtccaaaagcccttcgatcgctaaatcagcttgaattgttaaaatgcgcgaatccgtcaattgatagtcaaatgcgtcaataaagacgaagacatcctgtaaatggctcactttatttttcggaatggtaatatccacaggaaaacagtgagtcagttccgcacttccatcctctctctttctgacttgttcaacaaaccgcttatctgtataaatctcttcggtatgtttgttttgatctatgttgtactcacctgtaagttcaagcgatcctatgattgatacataatcatttacttcctgaaccctaatatcaggatctaatgaaatagaaagcagttcagaaacttcctgtcctttttggaaacagatcgattcttctacagaaaattgcaatcgatgattttgtggcaagttcatatcctcctttcatctaatccttaaaattagatgtcactaaaggtgtatgtatgaactggagaaaatatgagtgggagagcacgaaaaaaccggcacaaggagtccttgataccggttttcactcttatctgcggctgatctcagcaaatactttctcagctgcctggattgtgttttcaatatcttcatcagtatgggccgttgagaggaaaagaccttcgaattgtgatggcggaaggaataccccttcatttgccatccctttataatagcttgcgaacagcttcaaatcagatgatttcgctgtttcataattgatgactggttcgtttgtaaagaagaaaccgatcatcgaacctgcacggttaaaggtatgcggaatgccatgagcctcggcggcttttgaaattccttcttccagcctgtcgccttttttgatgaaattcttgtaggaatcaggtgtcagctgtttcaatgtctctaagccagccgtcatcgcaagcgggttgcctgacaatgtaccagcttgatagatcgggccgcttggagcgatctgctccatgatttctgcctttccgccataagcgccgacaggaagtccgcccccgattacttttcctaaacaagtcagatcaggcgttacgccgaagtagccttgagcgcagttataatcgacccggaagccagtcatcacttcatcaaaaatcagcagggagccgtactgctcagtgatatcacgcagaccctgcaggaaaccttcttgcggcggaacaacacccatatttccggcaactggctctacaatgactcccgcaatgtcttcaccgaattgctggaaagcaagctttacactgtctaaatcattgtacggaacggtgatggtgtttttcgcaatgccttcaggcacccccgggctgtcaggcagaccgagagtggcaacacctgaaccagctttaatcaagagagaatcgccgtgtccgtggtagcagccctcaaattttaaaatcttgttgcggcccgtatagccccttgccaaacggagggcactcattgtagcctctgttccggagcttaccattcggacgatttctacagatggcacacgatcaatgacgagcttagcaagttcattttctacttcagtcggagcaccgaagcttgtcccgtattcagccactgttttgaggctttctacgacgcggtcatttgtatgccctaaaattaaaggcccccatgacaagacgtagtcaatatattcattcccgtcaatatcaaagattttcgagccttttccgcgctccataaaaatcgggtccatgtctaccgatttaaatgcgcgaacgggactgttcacaccgcccggcatgagtttttgcgcttctttaaaagccgtttttgatttttcatagcttctcatctgcctcaactcctgtcaactgaataaaattactccgcaagccatttcgctgcgtctttcgcatgatacgtaataatcaggtcggcacccgcgcgcttcatgcttgtcaaaatttccaacacaatttctttttctttgatccagccgttctgcgctgcagccttcaccattgaatactctccgcttacattataagcgacgagcggcaaagtaaactcattttttacgtcacgcatgatatccatataagaaagcgaaggtttgacaatcaaaaagtccgcgccttcctcgacatctgattgtgcttcgcggagtgcctccatacggttggcagggtccatctgatatgttttgcggtctccgaattgcggtgtgctgtttgctgcatcacggaacggaccgtaaaactcacttgaatatttaacagcgtaagacatgatgggaatattgacgaatccttctttatcaagtgcttctctgatcactgtaacaaatccgtccatcatgtttgatggcgcaatgatatccgcacctgctttcgcttggctgacagctgtctgcgccaaaagttccagcgattcatcattgaggatgaccccgtctttgacaagtccgcaatggccgtggtctgtatattcgcacaggcacgtgtcagcgacaacaaccatttcagggaagtgttctttaatttctgtgatggctttttggacaattccgtgatcatggtacgcttgtgttccgcaatcatctttttcttccgggatgccgaacacgataacagattgaatgcccagtttgaccagctccgctacttcatccttcaataaatctaatgatacatggtaaacatcaggcattgacggaacagcttttttgccttccagcccttcaacgacaaaaatcggataaataaaatctgatggatgcaaacgtgtttcctttaccatttctctcattgcttttgatgtccgcaggcggcgatgtctattaaatgattgactcatattctctcttcctctcttgacatgctgcacattaattcaagcatgccatctattgtaaatgtatcaggcgtatgcgatgtgatgccgtacgtcagaagggcatcatttgttaaaggcccaatgctgatacaggccgtcccattcgccttccacttttttaattcttctcccaagacatgcataaacgtatgtacggttgatgaactcgtaaatgttacatagtcaaaggaatattgacccgcagcgtctttcagtgcctcaatgccttcttcatccggaatcgtttcgtagagaacccattcctttacttcaaaaccgagcgggacaagctcttgttttatcacatcacgtgacaaattccctttcatcacggtaatgggctcccccggttcagcatgctgcttaagagcgtcagccaattgttcagcaatatactcctgtggcatcacatcaaccgatacgttatgcgtttttaaacggcgggcggttttttcaccgacggctgcaatttttttatgcgcagggagaataagctgattttccttcagataagaaaaaaagaagtctgccccgttcacacttgtaaaaacaagccagcctggcgcggcaagatcctctcttacctgttccgcaacatcattcggcaaagcgcggcgaaacgtaatcaaagaggttaaaaccgctttaccgccaagcgcctccactttttgctgaaatgatgttgcctgtgccttattccgggtaacaagcactgtttttcctttcaacggaaaatcattttccatcctcatcaagctcccgttttacacgatcaattaaatcttttgctcctttgtcagccataagagcggcacagcgctttcctacttcctccggatcgtttccggtgacggtttctttaaaaatgattttgccgtcaggtgaagcgacaagacctgtcatttcaatttcatcctgtccatttaacacggagtagcctgcgatcggaacctggcagccgccctccatcgcgtttaaaaaagcacgttccgctaagacagtccgttttgtatattcatctgtaaactgagaaaacaacgccaacagctcttcatccgattctcggcactcaatcgccagtgctccctgccccacagcaggcaaacagcgctcaggctcaaggaattcggttacgacatcttgcttccaacccattctagaaaggccggcagccgctaaaataattgcgtcataatcctctgtttccagcttttgaagtcttgtatctatattacctctaatccatttaattgtaaggtcagggcgctcaatcaaaagctgcgcgcttcttcttaaactgcttgtgccaacgacagcaccttccttcatttctgaaagctttacgcgattctttgaaataagggcatcacgcgggtcctcccgttcaggaatacagccgatcacaagaccttcaggcaaaacagcaggcatgtccttcatgctgtgcactgccatatcaatctcttcgtttaaaagcgcctgttcaatttctttgacaaacagcccttttccacccacttttgagagtgtaacatctacaatccggtcgccctttgtcacgatctctttaatttcaaaagcaaacgaaggattgatttccttcagtttttgaataacccattttgtttgagtcatagcgagtttgctccgtctggaacctactttaatcgttctcatcatttctttcctcccgaatctgcttgggacatcgtttaactgaaccaatggaattgcgacaggcttccaagcaggaaataattgatcatcagcaccagaaaacaagccgtattccacagtgctgcgacctttccttgcagctctttaatcagcctgatataaagataatagctgtacagcagcaggacgacaaacgaaccaagcactttggcgtcaaaccaatacagcgtttctagtgagacatacgcccaaatgacgccgagaatcaaactcagcagcagcatcggaaccccaatgacatttaaaacatacgccatataatcaagcttagataaatcttctattctcaacagccattttccccactttttctttttcagcagatgatattgaaacatatatagcacagaaaaaacgaaagaaagggaaaaagcgccgtatgaaagaatcgccattgtaatatgaatcaccaaaagctcggatacaagctgcccggaaaaagcagctgactgctgctctgtcggtgaaaatgtgtgaatggcgatcatagaaaatcctataacatttgtaaaaaacacgataaagtcaacacgtaaaagctttgtcagtacaagtgacagcgtgacaagcacccaggcataaaaataaagcgcctccgtcacatttaataccggaaaccgccccgtcacccacataaaataggccaaatacacggtttgcagagtccagacaatagaaagcaaccagaaggccatttttccagccttccggttgtgttgaagaaaatctataaaataaaagagtacacttaacgcgtaaatgacgattgtcccctcattaagtcttgccattgcagtatcaatcattcagctttcactcacttacaagtgggctaaagcccgcttttgattcagccttcttaaaagagtggaccttctggctgctttccacggttttcatcatttgacggcccgcagcttcttcaatatcaaaaatctgcataaacaacgcgagcttttcttcagaatcagcatctgccgcaagctctttcacctttaaaatcggatcacgaagcatttggttaataatacttttggtgtgtttgttcaacagttttttctctcttgtgcttaagtgaggcagcttacgctcaatgctgtccatcgtttctgactggatagcaagcgccttttcgcgcaatgcagaaataaccggcacaacaccaagtgtattcatccattgtttaaattccacaatggtttcttcaattaacagttcaactttttcagctgtttctctccgctctttcatgttcgcttctacaatgccttccagatcgtcgatatcataaagaaaaacaccttcaagatcattcagcgccggatcaagatctctaggcacggcaatgtcgaccataaacagcggacgtcccttgcgaagcttattcgcgttttccatcatctctttggacacgacaaattcacttgcaccggttgaactgattaaaatatcagcctccgcaagcgcgctttcaagctgattcaagcttctcgcttcacctgagaaacggtctgcaagctccttcgctttcaagtatgttcggttaatgacagtgaccttgccgattccctgtccgtgcaggttttccgcagcaagctcgcccatttttcccgcaccgagaatcaatatgtgcttgcttgaaagatttccgaagatttttttagcaagttcaactgcagcatagcttactgacaccgcatttgagccaatgtctgtttcggcgtgagtccgtttgcccactgtaaccgcctgcttaaacagctcattaaaaatagtcccgatcgttttttcttgctgagctgttttaaagctgtcgcgtacctgtccgagaatctgcgtttcgccaatcaccatagaatcaagtccgcaggctacacggaataaatgctcaacagcggcatcgctctcataaaacgttaagaacggtgacagctcttctttgcttaattgaaaccaatcagctaaaaacttttttatataataacggccggtatggagctggtcgactaccgcataaatttcagtgcggttgcaggttgagacaatgatgttttcaagaatgcttttctcttctttcagctgcaccattgcttctgccagctcattcggctgaaaacttactttttcacgtatctcaataggggcggatttataatctactcccacaacaagtatatgcatcgctctaattacacccccaacgcccaatcttaatttataatcattctaacatagaactcattatttataataattataacatagtttctttcacaaaatgtgaacagattttaaaattcttatgctatattagaaaaagcttcagggaaaagaagcattcctattgacaataccaaaaacagcagaaatttactacacatcagctctaaaaaacaagaaggtgatatgcatgaaacaaaaatcaattttattcccttgcctgctgcttgccgcttctgtatatgcatggcttgaaagcggccaagctgaactgttttcgggacaggatcaatggcctgttctcctcatgctgttaggagcagcctttgtatatcaaggaaaaaaagaagccgttgcaccccatttctttatcggtttgcttctcttcgggatcggtttacacttttttgccaagccgaaatgggtatggtggccggatgattttgaaatgcttctctttatgatcggcttctcactactcgtttcaaccgttcaaaaaaaagaatatgtatatgaagctgtgtcgatgatttgtttttccctgtttttgtactttttcaaacaaattatggcatggcttgagtctgcgcatattccaacagcgcttctgaaggagtattggccgtttgtctttattggaatcagtttattgttattattgataaaacgaaaaaaatctatacgataaataaaaccggtagaggatcctctaccggtttatcatttttttgatcgctccccaagcttcgtcttttccctttttcgtttctgaggaaaagagaatcagctcgtcttccggatcaatatttaatgtttgtcggacaaccttcgcgtgtttgtcccatttgcctttcgggatcttatccgcctttgtagcgataacaataacaggaatgccgtaatactttaagaattcatacatctgtacatcatcattagatggcgcatgccgcaaatcaacgatctgcaccacagcttttaattcctcgcgtgtcgtgatataggtttcaatcattctcccccatgcttcacgctcagactttgacactttggcaaaaccgtagcccggcacatccacaaaatgcaactcatcattgataatgtagaaattaagtgtttgtgtttttcccggctttgatgacgttctcgcaagatttttgcgattgattaatgaattgataaaagacgattttcctacgttcgatcttccggccaatgcgatttccggaagccccccttcagggtactgttccggttttactgcactgatcacgatttctgactttgtgactttcatttcttctctcctactaaggcatgttccaaaacctcgtctaagtgggacgccaatataaatgtcagcccctccctgacgctttccggaatatcctctatatctttttcattatctttaggcgcaataatggtcgttaatcccgctctatgtgcgccaagcgctttttcctttaagccgccgatcggcagcacgcgcccgcgaagcgtgatttccccagtcatgccgacttcacgcgaaaccgcccgtcccgttaaagcagaaacaagcgctgttgccatcgtaataccggctgacggaccatcttttggcaccgcaccctctggtacatgtatatgaatatcatacttctcatgaaagtcaggttcaatgccaagttcttctgttttggatcgcacatagctgaatgcagcctgagcagactctctcataacatctccgagctttcctgtcaggattaatttccctttccccggagaaagcgatacttcaatcgacagcgtatctccgccaacggttgtataagcaagccctgtcactacaccaacctgatcctctgtctcagcttgtccatatctgaaaatacgttttccgataaagtcttgaaggttcttctcagtaaccgtaatccgttttcgctcttcagcaacaatggcttttgcagctttacggcaaatcgcggcaagctggcgttcaaggcttctcacaccagcttctctcgtatagtagcggataatatcaagaatcgcctgatcacgcagctgcaggttgcttttcttcagcccgtgttctttgatttgctttggaagcaagtgatcctttacgatttcaagtttttctatttctgtgtagcctgcgatattaataatttccattctgtctctgagcgggcccgggattgtggccaaattgttcgccgttgcgataaacagcactttggataaatcaaaggtttcttcaatatagtgatcactgaagctgctgttttgctctggatcaagcacttcaagcatagcggatgatgggtctcctctaaaatcagatgacattttgtcaatttcgtctaataagaagaccggattcagcttgcccgcttttttcatcccttgaataatacgtccaggcattgctccgacataggtccgtctgtgtccgcgtatctctgattcatcccgtactcctccgagtgagattctgacgaatttgcgtcccaagctttttgcaattgatttggctaaagacgtttttccgacacctggaggtcctgccaaacagagaatcgggcctttcagggatttggtcagcttctggacagccaaatattctaaaatacgttcttttactttttcaagcccgtggtgctcttcgtccaagagacgtcctgcttctttcaaatcaagcttatcatctgtttcatccgtccacggaagagcaaccagccagtcgatatagttgcggatcacagagctttccgcagaacttgacggaattttttcatatctgttcaattctttaagcgctgtttctttcacatgatcaggcatgcctgcttcttcgattttttccgtcagcgtctgaacttcgccagttttgccttctttatcgccaagctctttttggatcgccttcatttgttcacgcaagtagtattccttctgcgtacgctccatcgaacgtttgacgcgctgaccgatttttttctcaatctccagcacttctttttcattattaataaaatcaatgaccttgttcagcctgtctttgacatcagccgtttctaaaatatcctgcttatcctttagtttaaggggcagatgagaagcaacgatgtctgccattctccccggctcttcgatatcagtaaccgcagcgtacgtttcggccgagatttttttagaaatttttatgtactgatcaaagtggtctagcaaagtccgcatcaatgcttcgtcttctgtatcttttgaatcatcttcatgaataagttgaatgtcaaccgacgtgtaatcctcgtgttcattgtatttgacgatatgggcgcgcttgaggccctccaccaacacacgaatcgtaccgttcggaagcttcagcatttgcttaatttttgtataggtgccgacagtgaaaatctcgtcttcaccaggttcgtctatcgaaatatcctgctgagtggctaaaaatatcatatgatcatgcatcattgcctgttcaagagcctgaaccgacttgtcacgtcctacatctaaatgcaaaaccatcgtcgggtacactaataaacctcttaaagggaggagcgggatgctgcgttttaattcttctgccatgtgactgacacctccgtgactttagtatgaaccattataatacaactttttcatccttgtacaataaacggcatggttccattttctataaaacagtctcctcgtagtataccctttctttctgatatgaaaaaggaaaagatgtccttcatgaaaaaaaccctattatcaaaatagggtttaaacggattctttattgatttcgatatgaaacggtttttgttccgttggcggattcaccaaaatttcatcaagcacttcttggaacgtcttcactgcaataatctcgatcccgtcaatctgctttaagatggcctgctgattttcatatgggataatcacctttttcgcaccggactgcttggccgcttttattttcggaatgacgcctccgatgggtttcacaagaccgttcaggctgatttcgcccgtcatcgcaacggtattgtcaataggaattttgtgtatcgccgagaaaatccccgccgccatcgcaatgcctgctgacggcccatcaatcggaatccctcctgggaaattgatgtgaatatcataatcagaaggcttcattcccattgtccggagcacggttaatacattttcaaccgaacccttcgccatgctttttcgcctgatcgattttgattggctgccgatgctttcttcttcagctattcctgtgatgttaattgatcctttatcttgagccgcggttacacttacttcgatttccagaagcgatccgctgttaggcccatagactgcaagcccatttacaatgccaacctgtggttcaacaccgattttttgctcgtgctttggagtaagctgactggagtgaatgacccattcaatatcctcaatcgtaatgtcctttcgattctccgttacagccatccccgctgcgatttgaatcatattgacggcttcccgcccgttccgcgtgtagctggtcaaaagatccagtccttcttcggagataattttttcaattttatccgctgctgttttggcaaccgttttcaactcgtccttttcaagctcgcggaaaaaaacctccaaacagcgggaccggatagctggcggaatttcgtttggcattctcgtggtcgcgccaatcaagcgaaaatcagccggcagcccattttgaaaaatatcatgaatatgattcggaatttgtgtattttcctcactgtaatacgcactatctaaaaagacttttctgtcctcaagcaccttcagcattttattcatttgaataggatgcagctcccctatttcatcaataaacagcacaccgccatgggcatgggtgacagctccctgcttcggctgcggaatcccagcctgtcccatcgctccggccccttggtatatcgggtcatggacagagccgatgagtggatcggcaattcctctttcatcaaaacgggctgttgtcgcatcgagttccacaaagacagcctgctctttaaacggtgattgtttatgtttttttgcttcttccaacacaagccgcgcagcagccgttttcccaactcccggtggcccatagacaatcacatgctgaggatttggcccgcataaagccgcctttaatgctttaatgccgtcttcctgtccgacgatatctttaaagcttttggggcggaccttctcagataatggctcggacaagctgatagcgcgcattttccgaagctgctccatttccttctttgattctttatctatcgtgaccttttgtgtcctttgatttttaagcaaattccaaaaatacaaaccgatgatgatcccaaaaaacagctgaataaataacgcgatccctgtccaactcatggtggtccctcctgaaaaacaatttatgtatccaattcattcctctgattgctagtatctcccatagaagacgggaataaacgtttttccggaagagttgcatgcaaaaaaacctcctgagtgttaccactcaggaggtttgtgcttatctttatgcagatgttttatcttggcttacctcagtgccgtcttttaataagaggcgaggaggctctccgtgtgtcacagttgccccggtgattacacatttttcaatgtcatcacgagaaggcagctcaaacatcacatcaagcatgatgccttcaatgatggaacggagtccgcgtgctccagtcttgcgttcaattgcttttttagcaatttcagaaagcgcttcttcttcaaactcaagctcaacgttgtcaagctcaagcattttcttgaattgcttaactagagcgtttttcggttttgttaagatcgcaaccaatgcttcttcgtcaagcttttcaaggcttgcaataaccggaagacgtccgataaattcaggaattaacccgaaacggagcaaatcttcaggaagcacttttgaaagaagatcttctttctcaagatcagcagctttattgtcggcaccgaatccaatcactttttggcctaaacggcgtttgatgatttgttcgataccatcgaaagctccgccgcaaatgaacaaaatatttgttgtgtcaatttgaatgaattcttgatgaggatgcttacgtcccccttgaggcggcacgcttgccactgtaccctcaagaattttaagcaatgcctgctgtacaccctcacctgacacatcacgtgtgatagacgggttttcagattttctagccactttatcgatttcatcaatatagataatgcctttttcggctttttccacatcataatcagcagcttggatgagcttcaagagaatattctctacatcttcacccacgtatccagcttcagtcaaagatgtagcgtctgcaattgcaaacggcacatttaaaatgcgagccaatgtttgcgccagaagggttttaccgcttcccgtagggccgattaatgaaatattactttttgagagctcaacatcatcaactttgctgttagagttaatgcgcttatagtggttatacacagcaacagcaagtgatttcttcgcttgatcttggccgatgacatattcattcaaaatttcgcgaatttcctgaggctttggtacgtctttaaattctacttcttcttctgttccgagttcttcctctacaatttcagtgcagagttcgatacattcgtcacatatatatacaccaggtccagctacaagcttacgaacctgatcttgtgtttttccacagaacgagcattttaattgtcctttttcctcgttaaatttaaacattctttcaccccttaatcttgtctcactttttcttttaccggcagagcaaaagaaaatgattcttgaaacgaacgagtatgtattgcattttaccatactttccaaaaagacggtaacaatgtgtttctgacttgcacattctatatgtatgacaaaaaacagccctgcattaactatattgccccaagaaaaagagataactcataattgtacaaaacaaggcacgaatgattcgcgccctgttttattagtactattattatgcaccatattaacggttttctacaagaaaatcaattgctttgcgaacttttaaatcttctttcatcgcgtcagtagaaccgatggcttgtttaatattttcaacaggcatgttgtatgcttcagccattttagtaagctcagcatcaacttcctcatctgatacttcaaggttttccgctttcgcaatcgcctcaagagtcaggttagattttacgcgtttttcagcatcttctttcatttgctctttaagcgcagcttcatcttggcctgagaattgagtgtaaagctcaaggttcatgccttgcatttgcagacgctgttcgaattctttcagcatgcggtcaagctcagtgtcgaccattgcttgcggaacatcgatttcagcattttcagaagctttcagaacaagctcttcacgcaatttagcgtcagcttcgttttcttttgcttcttctaaacgtttctttgttttttcagttaattcagcaagtgtttccacttcttcatcgatatcttttgcgaattcatcgtcaagctcaggaagctctttcgctttgatttcgtgaattttcactttaaacacagctggtttgcctgcaagatcttcagcgtggtactcctcagggaatgtcacttcaacatccttctcagcacctgcttcaaggccaactaattgatcttcgaagccagggatgaatgagccagaacctacttctagagagtagttttcagcttttccgccttcgaaagcttcgccgtcaacgaatccttcgaaatcaagaacaactgtgtttccttcttcaacagcgccttcttcttttacaacaagctcagcttgacgctcttgaagggcttttagttcgttttgaacatcttcgtcagttacagttgtgtcgtctttttcaatgcccaggcctttgtattcgccaagcttcacttcaggttttactgttactttcgcagtgaagattaagctttcgcctttttcgattttttcaacatcgatttcaggacggtctacaggctcgattccagcttcttcaaccgctttagggtattctacaggaagaagaatatccaaagcatcttggtaaagagcttctacgccaaagcgctgttcgaataatccgcgaggaattttacctttacggaatccaggaattgaaacttgttttactacttttttaaatgcatcatcaagtgctgttttaaacgtttcagcatcaacttcaaccgttaaaacgccttcgttgccttcttgtttttcccattttacagacatgtgtttccctccaaaaatctattcaggttgtgtcggtcttccattctaaagcaatcattcggcttcgtccaacaaaaacaaagctgccaaagatcagaatcattatgtatagatgttaataatgaactgcaaagcctgtccaaccgtatttcttataacccgttatacacaaatacaaccactatattataacataacacatagcgctttcaactatatggcgcgatttacaaataagaaatttcttcaatatcttttaacattgtgcaagcttcatcgagttctctgtcggtaaattcatacatcatatgaagttcttctctttcaatttcaattccgtgcatctcgtaaccgactttatgcagggcagccgcccaaaggtcagccgacagcaatttcggctggaacggatataaaacgtacaaatgtcttctccacaattcttctactgccgcgtataaggttggattttcatttccaagtgtttcatccagcaccctgagaacacggtgcagaatcggcgcggcatcaggcggaacaatctcagacggttcaattgtcaacgactcgccaaatttactaatgtgtacaggtttactgtactcatgctcagctaacagcatgacaatcatcgttttgataatcggatgggctgaggggtcttggaggattgttttgagcaatcctgtatactttgctacgttacggtcttttaaggaatggatgagattcatttgctcctcagggcttgccagcactttctcggtgtcaattgtatcctcatattcttcggcccaagcctcgtcctcacgatctggatcggtcattttccggctgaaatccagcagcttataaaattgctcggcgctttctgccggcagctgattttcttccaaaacggcttcaatggtgcttttgacttcttcgtattttttgagctgaattaagatggtcatgtacacctgcaaaaccgtaaaataatggccataaccttctttgagcatcttctcgcacacgctttctgcctcttccagctcgcccagctctaaaaagcagatggccatccctaagtgaagatcggattcagtatcatcatatttcatcgcttctgaaaacagttcaagcgcttcttgatactttttttccttgagtgatgacatccctttttccacaaggcggtctttcagatgaggaaaaggaataatttttgcgtttttcttgtcatgcgtcatacctatattcctttcaggcatttattttgttcaagtgtatcaacacctgtgaacaaacacaagaaatgaaaggtttcaccaggcaaaaaaagccgccggacaaataccggccgctttttcagtcttgaagccaagagcttctttgtgattcaaattgcttgatttcatcttccagcagcagcgttaatgaaatttcatcatatccgttgatcagcatctctttccaatgcgggtcaacttcaaatgaaatttgattgccttcactgtcatgaatcagctgattttcaaggtcaacagtcatttgcaatgacttgttttcatactggccgacaagctgtttccaattgtcatatggcatgcggatcggaagcatgccgtttttaaagcagttctgatgaaaaatatcagcaaatgacggcgcaatgataattttaaacccataatcatcaagtgcccacggagcgtgttcacgcgatgacccgcagccgaagttttctcctgctattaaaatggaagctccttgataaacaggctggtttaattcaaattcagggttcggttcaccattcgcatcatatctccagtcaaagaatgcaaaacgcccgtagcctgttctttcaatcctcttcaaaaattgcttaggaataatctggtctgtatccacattgatccgatttaatacggctgctttccccgtatgtgatttcaaaggttccatctcgcgcactccttacacaactgttttttcctgataaaactttctgacatcaacgaagtgtccgtgaatggcagccatcgcagccattgccgggctgacgagatgtgttcttgcaccttttccttgtctgccctcgaagttgcggttagaggttgatgcacagcgctctccctcaggaacaacatcattattcatactcaaacacatgctgcagcctgactctctccattcaaatccagcttccaagaaaatctggtcaagcccttctttttcagcctgaagcttcacgctttgagatccgggcacgacgatggcccttacgctgtcagctaccttcttccctttgatcatatcagcagcctgtcgaaggtcagtcatgcgggaattcgtgcaggaaccgataaatacgtgctccactttaatgtcttcaattttttggtgaggagtcagtcccatatattcataagcgcgaatcgcttcttttttatcatcttctgcagaaaagctttccggcgcaggaacttcagaatcgacaggaagaaccattcccgggttaatgccccatgtcaccataggggaaattttgttgccgtcaaggaagatagatttatcataaacagcgcccgggtctgtgcgcagcgccctccattcctctacggccttgtcaaattcttcgccttttggcgtgtacttgcggtttttgcaatattcaaacgtcacctcgtcaggtgcaatcaaacctgctcttgctcctgcttcaattgacatgttacaaacagtcattcgttcatccatcgtcatatttctgaatacttccccagtgtattcaatgacgtagcctgtgccgaatttcacaccgtatttgccgatgacagaaaggatgacatcctttgccgttacccctttttgaagcgttccatctacgcgcacttcaagtgtttttggacgctgctgccaaagtgtctgtgtggaaaggacatgttcaacttcactcgtcccgattccaaatgcaagagcgccgaaagcgccatgtgttgatgtatgactgtcaccgcacacaatcgttttccctggaagcgttaagcccagttcagggccgacgacatggacaatcccttgatccacactgtgaagatcggcaaggcgcacgccaaattcctcacagtttctttcaagcgccgttacttggcgtttcgcaacttcatcctttatctcaaaacgattgacagtcgggatgttgtggtccattgtcgcaaatgtattttggggtcttctgacctttcttcccttttgtctcaaaccttcaaatgcctgaggagacgtcacctcatgaatgaggtgcaaatcaatatagagaagatccggctttccctcaccatgttttacaatatgctgatcccaaatcttttcgatgattgttcgaggcatcatcttttatttcctccctctacctagagctaagaccgcttaacgtaagctgtcacacattagaaattgtattttcactcatgattgctgccttaacttcctctgtaatggcctgagtgctgctgaactcttcaccccgtgccaaatcttttgttcttttcccagaagccaagactttgtttaccgcatcttctacagctttcgcttcctcttcaagcccgaaagatgttctcaaaagcattgccgctgacaatatggctgcgaacggatttgccatccctttaccggcaatatcaggcgcggagccatgaacaggttcaaacagatgaagaccagagcttgataggctggctgacgggagcattccgagcgagcctgtaagcatggacgcttcatcgcttaaaatatcaccgaacatattttcagtcaccacgacatcaaattgattcggtgcataaattagctgcatggccgcgttatccacaagcatgtgctcaagcttcacatcaggaaactcttgtgcaacgtcctcagccacttcacgccacagccggcttgattcaagaacattcgctttatctacagaggtcactttgccttttctggctgccgccattttgaagccctctctgatcactcgttcaatttccgttctcttataaaacagtgtatctactgcttcctgctcaccttcagtgtttacataacgtttgctcggctggccgaaatacaagccgcctgtgagctcacgaacgataacgaaatcaacattatctatatattcttttttcaaaggcgaagcgtcagaaaggctttcaaataccttcacaggccgcaaattcgcaaacaaatcaagctgttttctgatgctgagcagccctttttccggtctcagttccgaaggattttgatcccatttcggtccgccgacagcgccaagcaatatcgcgtctgcatttttacaagcagcaacggtttcctccgggagggggttatgatgttcatcaatagccgcccctccaatcaggccatattcaaattcaaattcatggttaaagcgttcggcaacacttttcagtacgtctgtcgctgattctaatacttcagggccgatcccgtctccgggcaatagagcaatacgtttcttcaagttaaccgttctcctttcttttatgatccgacagctgtgtggtttttcaatccgctcatattcgactggaaaaccaattgacggttgactgcgttcaaataggctttcgctgatgcttctaatacgtcttgcgctatgccccgacctgctgattcttttccgttcaccaaaactcttacatacacctgggcaaatgcatcttcgccttttctgttagactgaatgcggtagtctaagagctccacgtccttatcgatgcagcgctcaagcgtattgtagattgcttccacacttccagctccagttgcagcttcctgaataagctctgcgttttcttgatttttcaacgaaagagtagccgtagggacctgacttgttccgtaatgtacttgcagagaaagaaattcatacccaatcttgcgatctgttactttttcttctaaaataagagaaacaagatcctcatcagtgatttcttttttcttctcagtcaactctttgaacatcgtaaagaatttattaatctcttcactgtcaaattggaatcctaaagcagtcagccggtctttaaatgcgtggcgtccggaatgtttacctaggacaagcgcatctgcggttacgccgacaagctccggtgaaataatttcataagtcgatttttcctttaaaaagccgtcctgatggatgcctgattcatgagcaaatgcattatctccaacaaccgctttgttgcgcgggacagccatgcctgtcagtttgcttactaaatcacttgttctcttaatctcgttcagtgtaatacctgtttcgacttggtagaaatcttttctggtatgaagggctacagcaatttcctctaatgccgcgtttccggctctttcaccgatcccgttcacagcgcattcgatttgatcagcgccattttcaatcgcagcaagagagtttgcgactgccattcccaaatcatcatgacagtgggctgaaagctttgctttgtgaatgttcggaacgttttctttcatatatttaaagatatttccgtattccgccggggccaggtagccgacagtgtccggaagattgataacactggcgcctgcgtcaatcactttttcgacgatttctgctagaaacggcagttcagtgcggcaggcatcttcagctgaccattgcacaatcggaaaacgttcttttgcgtatttcaccatttcaaccgctctttcaatgacttgctcacgtgtcattttcagcttgtgcttcaaatgaatgtccgatgtggcgataaaaacatgaattctcgggtgagaaccttcttttaacgcttcccaagcagcatcaatatcaccttttacacaacgggccagaccagttactgaacaatttttaatggttcttgcgatttcctgaacagctaaaaagtcacctcgggacgaagcgggaaatcccgcttcaatgatatctgccccgagtctttcgagctgcttagctatggcaagtttctcctgtgtattcaagttcactccaggggactgttcaccatcacgaagcgtcgtatcgaaaaaattaattttgcgcaacggagaccaccgcttccttcttcttgccttgtttcacaaacggcatcatttcacgaagctttcttcccactacttcgatttgatgttcgttctcgcttgcattgatagcattgaaacgaggacggtttacttggttttcgacgatccactcttttgcgaatgtaccgttttggatatcttttaatacttctttcatagattcttttactttagcgtccacaacgcgaggacctgatacgaaatctccccactgtgctgtgtcagagattgaatatctcattcctgcaagtccttcttcgtacataaggtctacgattaatttcagctcatgaaggcactcgaagtatgcaagttcaggctgataacctgcttcagttaatgtttcaaatccggctttgacaagcgcgcttaatccgccgcaaagaactgcttgctcaccgaacaaatctgtttctgtttcttctttaaatgtcgtttctaatacgcccgctcttgcgccgccgattcctttagcataagcgagggctttgtctcttgcttctccagtcacatcttgatagattgcgaacaatgccggtacgccagctccttgctcatatgttcttcttaccaagtgtcccgggcctttaggggccactaagaatacatctacatccgccggaggaacaatttgatggaaatgcacgttaaatccatgagcaaatactaatgattttcctgctgtcaattcatctttgatttcagcttcgtatactttttgctgttgctcatccggaagcagaaccatgatgatttcggcttgggctgccgcttcttttactgaaaatactttatgtccgtcttcttgggcttgagtgaaagattttccttgtctaacaccgacgatcacgtctactccgctttctttaaggttcagggcatgtgcgtggccttgcgaaccgtacccgataaccgctactgtttttccagccaatacgttctctttgatatcaccgttataatatacttttaccattttaatctctcccttgttatgttttatacaatagatattgttttattggatgacgccttttgctgggttcccctcgcaaaagccgttgtacctgttctcgcgatttctttaatgccataaggttttaataactcaataagcgcttcaattttgttagattcacccgtcacctgaacaacgatgctgtctctgctgacatcaacgacagaggctctaaacggttctatgattccattaatctctgttctcgttgaaggtgcggagacaaccttgattaaggccagctccctctggacaatcgattgatttgtgatgtccgtgactttcagcacatcaatctgtttgttgagctgtttcgttaactgttcaacatcattttctccttcaacgtgaacgacgaaggtgattctggaaacgccggctgtttctgtgtgcccaactgtaatgctttcaatgttgtaatgcctttttgtgaatagaccggtgatccggtttaacaccccggagcggttcaccacagtcaatgtgataattcttttcaaggtttcacccccaccatttcatgcagccctttccccggagccaccatcgggaatactttttcttcgctggcaacccgcacatcaatgacaacaggttctcttgatgttaatgcctcttccagcttttcctttgcttccgcttctgatgaaattctgatgcctttaatgccgtatgcttcggacaatttgacgaagtcaggctgagaagcgaatttagattctgaataacgttcttcatagaaaatttcctgccactgtctgaccattccgagacaagcgttatttaaaatcactaccttgaccggaagatttaattcgcgaataacatcgagttcttggagcgtcatttggaatccgccgtctccgacaaccgcgacaacagtagcatctttttcggccagctgtgcgccgatcgccgccggaagaccgaatcccatcgttccaagtccgcctgacgtgacccatttatctgctttttggaacggataaaattgcgctgaccacatttgatgctggcctacatctgttgcgacaatggcctctccttttgtaaattgatgaatatattcaatcaatttctgaggtttaaaaccttcttcttcattatctacataccagagcggatactcttctttccattcagcgagctgttttttccattcgcttgaatcgctttgtttgccgtcttgtttgatcagctcctgcaggacaattttgctgtctccgactacaggaatctgtgttttcatgatttttccgatttcagctggatcaatatcgatgtgggctatctttgcgtttctggcaaagtgtttcaggtttcctgtgacacggtcatcaaaacgggcgccgatactgattaatagatcacattcatgaagggccatattggctgtataagtaccgtgcattcccgccatccctagaaaaagcggatggtcagccgggaagcctccgagccccaaaagggtgtgtgccacagggatttgctgctgttcggcataattttttaattcttctgacgcttttccgtgcagtacgcccgcacccgccaggatcaccggttttttcgcactgctcacggcttccacaagcttgcggatctgcaaataattcggctctgttgtcggctggtatcccgggagattcatctcatgatcgtagctgaattctccttcaattgttgctacatctttcggaatatcaatcaatacaggtccgggtcttccagttgttgcaatatggaacgcttctttaatgatgcgcggcagatcttccggctggcgaacctggtagctgtgttttgttactggcatcgtaatccctaaaatgtctgcttcctgaaatgcatcgctcccgattacagaggttgctacctgccctgtaaagacgactaacggcaatgaatcaatcatggcatcagcaaggcctgtaacaaggtttgtcgctcccggccctgacgtggcaatgacgacacccggttttccggagacccttgcgtatccctccgctgcatgaattgctccttgttcgtgacggggaaggatatgtaccaaccctgaattgtatagcttatcgtaaatcggaagcacagccccgcccggataaccgaagatcatttctactttctctttttttaatgattcaatcagcattaatgctccgctcatcgtctgtgtacattcggcagatgctgaatccacctgtacattagtccccattttagttcctccttttggattttcatcctttaaagatcatcttttcattagctatatagctgattattcaataaaaaaagcccttccgcccacaatcagccgcgcagtaactgcgatagctaaaaggggcgaaaaggcttttctttccgcggtaccacccttgtttacggcctgttaatcggccgtctcatggatatttctatccgctttagtaacgagtgaatcaagttcacccggccaagtcctactgtcatttcagactggcactctgaggcgagttcaccttgtaaagcttcgccggttctcagctaacccggttctctgtggaaagctttttcaaggctacttatcctcatctgcgcttttcatattcagccttcggaacggttttccagctgttcaagaaggtcgtttgtttttcactttttagaatcatactgcgatgattttcgcttgtgaagcttgcgtttatcttttgttgaactcatattacgccgctttggacgcagtgtcaacagcattttttaaaattattagacaattttgattaatcaatctatattgtatacgctttcattattggtacaaaaggaattgcaaatgttaaaagtttttataatttttttattaatctatcaagaataaaccagaattatttaattttatataaacatgtaagattttataacacgctatggttcgtatatggattgagtctgacagatcatcttgcaatccatttcaatttcggataggcacccctattattcctcggcatacattaatggtatcttgcaaagaaaaggtgatacgatgaataaatcatttgcagacatgcaaggatttcctgcgggctttccaagcttccccaactttccgcagcagtattatcctgctacccctgccttctaccagcaaagccagcagccatttggaggctacggatacggacagccgttcagtcaggcatacagcccgttaaccactccctctggaatgtactcctcattcccatacgcttcagggttttacggacagcaattttcaggtgcaggctttagcggccatggcggcagcttaagtgctccagcgatacatgccggcggattcagcggggcgccaggcgtacacggaggctttagatattaaagaagaccacaagggccgaacatctattgcggtccttttattgttttaaaacgacttcacaaatacagtcacattttctgtctttatatttggaaacaggatggaatatgattagatgaattgaacgatattctgcacaatccgtaagttttcgaggaggaataaaattgcatataaaaatagacgatttaactggacgtcaggtggtttcactggtgaatgagcatttacatagcatgacgcttatgtccccgccagaaagcattcatgccttaggtttagaaaaactaagagggcctgaaataacattttggagcgcatgggaaggtgatgaactagctggctgcggagcgctaaaagaactggacacccggcatggagaaatcaaatcaatgcgaacatctgcatcacatttaagaaaaggcgttgccaaacaagttctccagcacatcattgaagaagccgagaagcgaggctatgagcggttaagcttagaaacgggttcaatggcttcatttgagccggcaagaaaattgtatgaaagcttcgtttttcagtactgtgaaccgtttgcagactacagtgaagatccaaacagtgtgtttatgactaaggaaatgtgagacgattttataaggatagataagtgcaggggaaggtctgtcttatctatctttttttatattcacacatttttcacctttatgatacacgccaatgttttcaattttgtttaattcaaagaacagcgggaattacaaacgacatgaacgatatcatgcaaattcataaaggaggagattgatatgaaaagcatagttggtgtatatgaaactccgcaggaaaccatcgcagcgattgaaggcttactcacaaaaggctatgattctgatgacatttctgttgtgacaagccggcgagatacagattatttggagtcacgtacaggaacagaagtcaatcaagccatcgatgcacatcaggacgaatctgaatcttttttcgataaactgaaagattatttcacaatggatgatacttctacacacagcaaagcattatccgacttggatattaaaactgatgaaatagacaagtatcaagaagatttggatgacggaaaacttctggtagccgtcgatacagatgcaaatgtaaatgctcctattgataacggcaatgccctttcaggcggcttttcaagcacaaatgaattggattatacaacgaaagaagaaaaaacgatgccgctccgggaagaacagctgaaggtcgataaggaagacgttcaaaccggcgaagtagaaataggaaaagaagtgaaaacagaaaaaagagatatggacattccggtgagacatgatgaaatttatgtcgaacgccgtccagtggatgaaaataaaacggacgctgctcccgtcaacgattcggaagagatcagagttccaatcgttgaggaaaagctggaagtgactaaaaaaccggttgtcactgatgaagtggttgtcggcaaacgcactgttgaagaaaatgaacatatttctgaaactgtgaaaaaagaagaacctcgtctgaataaagaaggaaaagttgacggcttggatgatgatccgttaaataacaaatgaaaatcataagacgacaacaaaaacctcaaatccatttaggatttgaggtttttcttttggtacgtcccaggagagattcgaactcccgaccgacggcttagaaggccgttgctctatccagctgagctactgggacacgttttgtttttcgctttaactatcagcgacaagatttattatatatgggatgcaataataagtcaacggttttttagaatttttttcatgaggaagaaaattttcttcctcatgacattttcatagtgtgactcggttttgcagatcctcaatttcattgcctgcttggtcgtaaaaacggactgtcgcagcatcattttctaatgtcagtatagcatagctttctgtcctgcgcaccctcggaagccggatgctacctgggttaatcatcagttttccgcgcagcacttcgcttcccgcgatgtgcgaatgcccgaagcagataacatccgctccgagctcctctgcacgatagtatacgtttaacaaggtctgttttataccgtgaaggtggccgtgtgtgaccagtatttttcttgagccggcattcagaagaagctcgtccttaaaatcgccggcaaaatcgcaattgccttttacaaccgcataaggctccaatgcaggatgcctcgtttcaagctcagagtccccgcaatgaatcatgagatcaacttctgcctcatgccgtttcgcaatggtttggagttcttcttcaagcccatggctgtcactgataatcagcacgttcatgtacaagcttcctccttatgcctccaaaagcttagacagctttttaagcgcgtcagccctatggctgattttatttttttcatcacttgtcagttcagccattgtcttatctttatctttcacgataaagattgggtcatagccaaagccatattctcctctcggttcttcggcaatatacccttcaacatggccttcgactgtttttgtttcctctccgggaatactcacggccagtgcgcagcggaaacgggcggtgcgctgttctttttcgatacctttcagctcgctgagcactttttcgatatttgcctggtcgtctttctgttcccctgcatagcgggctgaataaaccccgggtctgccgccaagattatcgatggatagaccggagtcgtccgcaatcaccattttgttcactgctttggcaacagcttccgctttcagaatggcattttcttcaaatgtatggcctgtttcttcaatttcttctgtgaatccaatttcagctaaagatttgacatcatagcctcttggctcaagaatttctttgaattccttcacttttcccggattatgtgtcgcaataattgcttctttcatgatgatcaagcctttctgtctttatttcagttctggcagagaatcacccagcacttctttttgcttgtcaatcagctcttgaattcctttttccgcaagacccagaagaccgttcagatcctctcttgaaaaagtcgcctcttccccggttccctgcagttccacaaaacggccgctgcctgtcatgatgacattcatgtcaacttcagccgaggaatcttcttcataatttaaatctaacaaaattccctgttccttatcaattccaacagagattgcagcaagaaaatcagtgatcggatttgtcttgattgttcctgctttgatcagcttgccaatcgcaatcgccatagcaagaaatgcgcctgtaatggaagctgttctagttcctccatcagcttgaataacatcacagtcaatccaaatcgtccgttcaccgagcttttccagatctacaacagctcgaagcgcgcggccgatcaggcgttggatctccattgttctgccggaaattttccccttagaagattctctgattgttctttggtttgttgcccgcggcagcatgctgtactctgctgtaatccagcctttccctccgccccgcaaaaacggcggtacgcggtcctcaacagacgcgttgcagattacctttgtattccctgctgttattagaacagaaccttccggatggctgataaaatccaaatcgaatgtgattggacgcagctcatcgtgttgtcttccgtcatgtctcatgttttacctccgattgtatgtacataaaccatttttgtcccggaattgaataaagaaagaggcagccggaacgctaacctctttctttctagtatatcaaaaatcccaatttaaaaactacccgtattcacttgagatggtctggagaccggttctgtgagcttttcgcctttttcatttacaagctctgattttccgttcactttaacagagacgctttttacatccggctgctccgttaacgtcagcacaatgctgttcagcacttctgaagaaatcattttcgtcttctcatcggcgctgccgaatatagattgattgaaatccaacgtcacgcgcccgtctttgattttcggtttgctgaccagctttacatcttcactgaagtctgttaacagcccgctcaccttgcttggccctttagccaattcattgatggctgccgtgatgtcgtctttttccgaattgtcgattcgtttggtcaccggcacgtagtattcactgtcttcgttttccgccaagtagtagactgtcagcggatgggtagcagtgagatcatttacaccggctgtttccaaattaatgccgtctttgcggcttaaatcatctgagatcggcgtccctcctacaggcatctccttcagttcatgcccgtttattctcagcttcactttatctatcgaactaaattgcgtcagtgtccacgtcacagattgaacgattttctgttcgtcttctttcttataatttttgaactcattagagaaatcagctatcgcggttccatcttttttgatgtcaacgttaacggtggtgtcagccggcaatacagctctgaagccattcggaagaatttcagacacaggcccgccctgtacgaggtattcaagcgcctgcttagccgtgctctcacttttagggagaggcagcgtttgcgcaacaacatatccgtttttatcaatgagataaagctccctcataacagtagatgaggcttgatccgcttttgcggtatcgcttttttcactttctgtttttttggctgctgttgtatttgaattggcacccgcttcatcgttcacgaatgtaacgtcttgaggcggatcaatttcctcggctgccttatcagattgaaacaaaccgcatccggataaaagcaaggcagaggtgagacaagtggcaccaatgactgcaggtccttttttcagcatacttttccctcctaaggatgtttgtactattatgtatacgagcctctttaggaaatagaccgaagaattccggcaaaacagaaaaaaacccgcaacataccgttgcggggaaaactatcttttaatcggttcttgcagtgagatacattccacatgcccgacttcatggccaaaccaatcgtctgcgatttttgcaaactgatcacgcgcccctgttgtcaggaactgatgatccggggcaatcggagactggttcagcagccctttataagagagaattgtgctgacttcccgggctgtttcatcgccggacgaaataatgtttacgtgctctcccatatatctttgaatggcttcttttaaaatagggtaatgggtgcagcctaaaatcagcgaatcaattgatgtgtcttttaacggatacagcgaggttttaacaatctcgtctgctgttttgtcgagaaacttcccgctttccacaaaaggcacaagcagcgggcaggcaaggttttcaaccttcaaatcagggtttaatgccaaaagcgcttcttcgtatgcattgctcttaatcgtattctctgtgccgatgacaccgatatgctgattatccgtcacttttatcgctgctctcgcaccaggctggatgactccgaccaccggtataccgacgctgcgctggatgtcatccaatgcgatcgctgttgctgtattacaggcgatcacgagcattttgatgtggtggttttcgagtaaataattcgtcagctcccacgtatattgaagcacctcttcttcagggcgcggcccataaggacaccgtttcgtatccccgacgtagataatattttctttaggtagctgtctcatgatttccttcgcaacggttaaaccgccaaccccggaatcaatgactcctattggttgttccaacaaaatcgcctcattttctcttcatttcatgctgcagtttcatcaaagatttttcgaagatggctatttcttcatctgtaaacgattcgaacatatcacgcagatattcctgtctttttgtaatgacctcttggataatccgttctccttcaggcagcagatgtatcctgacaacacgtctgtccgccgggtccttgacccgctcaacaagctcatttttttgcatgcggtcgattaagtccgttgtcgtgctgcatgccagatacattttgcccgataattcaccgattgtcatatctcctaattcataaagccattgcaagccgacaaattgcggcggcgtaatcgcatattggttaaggatttctcgtcctttttgcttaatgatcgcggcaatgtggcggagtgacttttcaatatccgcaacatgctccaaaggttttgatgtcatttgtccatccctcactcaaggatctcttacgcacaaaagcgttccgtgtctattttccttcttttttgaagaaaatgcaagactcgcaggagagaaatagaggactttagtcaaacaacatcaagaaataaaatttaatttatgacttgcctacgttttgcacagcattccaaatatggtttcgaatgttccaaacaaacagcaataaccggctccttccaaaagaaggaataccggcaaggattaaagctctagctcacccattctaagaagctcaacaacggcttgcgaacgccctttcacacccaatttctgcatggcatttgatatgcatatctatcgcaaactaaaacaataataatcacttgaatttataatggaaatcgactgttccatcctcgtatattacaagtttatcaataagcgctgaaaatgcttcgaataaatcctgatcagttctttccagctgtgcgaatgcattcttaatatttgatatgtcgattgtttcttcttcctcacgctcaagcatgaacagcttatcgttcagtttttcaatttgttcttcaagctcttttcgcttcgcctggaattccgccttagtgatcaactgatcttccaagtacaattcgattagacgttttttcttgttttctgcgttttcaatttctattttcgttcgcttgatccggtttttcttctgctcttcaaaatcagattttacatccagttttaacttcttgcccttttgtttcagtgttttaataacaaaagcccgcaagtccttatattgcatcggagcatggtttacacaaagagcagttccacctcgtctgtaggcgctacacttcaaataattaaactctttcttctcacgtttctgattgtatttgtacgacggtagcacaaccatattgcaaccgcacacaccacatttcatcattcctcgtagctcattccgagggttaaaacgctttttacgcatcttgtgttctttgttattagctttctcatactcttcttctgatatgatcttaggacaccagtctttgtaaacagtccatttttcttttgggttgcggataaattttttccgtccccctattttgacttgagtatgtctattggcaataaacacgccacaataaataggattctttaaaatcgtttgtactgtagacagctgccaaaactcagtcttttgaggctttacaatgtttccgagtgccaattcttcgttgagcttgagaacgattcttttatgtccatacccatgattattatgaagatcgaaaataaaacgaacgacttttgcttcttcttcattgatagctaggaatttaccttctttcttaaatccaaaaggtacacggccggaatgttcaccacggcgagcttttgctgctagtgccccgctggctgccactgaaattgtttgaggatattgggcagcaaacattgaaaacatttcaaatttcattgagtttttgccttcatatagactatcgtacccctcttcgagcgtcacaactcttacaccgtgggccaataaaacctctcgaatttcaagggcatctttaagatcacgagcaagccggctgattgatttaaaaacaaccatcttcagctttcttttttgcgccttatctaaaatgagttgcatcgcttttcgatcaagcagcactgtcccgcttatcccatcatctaattggattgcttcatctttccattcgtaattatttttctcaatccaatgatgacaaatatcaatttggttggctattgatgtcacctgttcatctttttctgaggaaacccgtgcgtaaactgcataagggtaatcttcatatttgatgatctcctgtgtttctgtctctttgaagaacactaaaccaccccattattttgcatttggtacattttagtgtgattatagcataatgattacgaacctcctatacttttccggttgattttcgaacatttgttcttgtataatttgttcaaggagttgatcagaatgaacgagggtatttatgataaaagatgggaacaaaaatttattttgcctgagcaaaggacagcgctattaaataggaagaaacaagtccaaaaaattgaaaaacccatcttagatgaataccaattggaagatatggcccgtgttatttgcgaggcgatggaattcaactcggttctggtcatcggtgtatacagagacggttttatcgaagaagtaaaaggacatgtccattacatagatgaagtaaaacagaggctgcacgtgaaggatttaaaaggtgatacaaattttattgcatttggttcagttctttcagtagagcaaaaataaaaagaaccagccacataataagctggtccttatctttaattaaagaaatggttatgtaaagctttagaaaatccaaaaccttcttctggtccctttaaccagagagaaataaacttttcgaaatctacttctttttcaatatctttcaaaattcttttaaattcttcagtaaagttatgaagagagacctcttcgccatttttaagtttatcagtgtactggctcgttaactctcttaatccttgatactgtttttcacttaaatcataagccaaaacttgatcaaataagccaaaccgatcataatcagctgctaattgttggactaaccttagttgaaaagcctgtttctcgacttttttttctaggttgtcaagcctttcttctactgttaccaattcaaatcacctcaattaaaaagctaagaaagtaaatacacttgcaatagttctagctgtagaagattttacaccagcatcaattagatatgaggaaacagtgtcaataattgcgtcctccacaacgtcacctcgtttaactaactcgtccaaagcatctgctacatcatcagtatgttttgcgaaggtttttcctgctgatccacctaactcatcgactacctcaccaacaattctcccaccatgtcgaagcgcactggctgttgccttcattgcttctttagcaatccattttttaataccatttgtgtgaaattcaccagattgttcagttgtattagttgataattcggatagtttagcaggagtttgataagtgacttcttgctgtgcctgtaatgttacctcttgagctttggcatgtccatccaacggaagaactaatgataaagagaaagttaatgcggatgttgctaaaagtaatttcttaaacatgaaatcaatccctttcttttaaattatttacatgtaaatgatagcattatatttcgactagaaaaataatgctttttactcaaatattagaataattttgaactatctgtaacaaaataaacaaaagtatctcctcgagaaagatactcaaggagactatttatttacttcaagagcgcttctagtttcgctttcgtatctggtccatatataccgtcttgaggaagcccgtacattgactggaaccttctaacggcatcagctgttttcggtccataataactatctatcccgaagtttttagcttttttatccggatagaaatgcaatgccgccagcgctgtttgaatctgttcaacagcatcactgtgcatcaatgggctcttcactttgaaaatgccagaaggcagattgaaagatgatttctttttgcttgagcttggttttttcactgccttggacgaagttgttttcttgctggatgatttgccgccaagtgcttttaattcagcatcaatagccgctttaacctcattccagcgtccctcgtctaaaatacggtgagggcaatactttccgctccaatcttggtgcttccgcactcgatcaataccccatccgcgttctttaagcagctgagcaacaaacttgatagccaacttttcagcagccctgtatttaggccctcctgacttgctgtagcagatttcaacgccaatagacttacggttcccggtaccgtttgttccgtctcctgtatgccatgcattgcgatctgttgggatgccctgccttacctctttatcatcaacagcaaagtgaaagctcgttgaacttgtgtttccgatcatatagctgacctcgttagcagcagatgcatcattgtaagtgttatgaatggtgatgtattccgcggtcatcggattagggcattttaaagcgtattttgcttctgatacaaggttctttttcactgcgattgtcataaatgatctctcctattctgcttttgaattagaaagagccgccagctggcagctcacttggttagattgtgatttttcaggacagctttttgctgatggccttttgcagtcacatagttgtttttgaaccatgctgtaaatgtcgtgccaatagtaaaggctatagagcccgcagtgtacagcgcatccgcaagctgattcacctgatcctccgtaatatccaaaggtgatttgccaagcatcagcattgtttggttgataagtgcaatcaaaagaagcaccgtccgaatgaccgtgcctttgtcaaagtttttcatattgtgttttcctccttatttttgcaaaacagtataaaaaatagcgattgcgccgccaataacgccagtgcatatcgctgtaatgatagcgccagttattgtgcgtttgatccaagttgtattctcttcgatcttgttgagtttttcgtttaatgtcatgatttgctggtcttgtctatcagaaacgcgttcaagaacatttacacgctgttcaatcgttttctggcctgccttcatttccattatctctttttgtaatgcatgcacatctggtacctccgtcacttctgacattagtacgccccccttatatctatttcacgtttttcacctccttagaggcaaaataaaaaagccttattgactggctcctgtcgtttcctcgtatggttgacctgttacttcttggtattggtcatgtgtaatgtattgtgcctgaacaccttctttcaagtcatcaacggaacaatcgttaaatgccatagcctgctttaccatggctgttgtggcccatttgtagaacaacgcaaatacccagaaattaagattcacttgtcattcctccctttaaatagagaacatctaattttaaagatgcaacttgctcacctaaagattgattcaaattttctgcttcttttcttgctagcacttccgcagtcaattgtacgcctaaagcattttgagccagctcagcctgttttcttgccagtttttcgtctgccagctgttgcccaagtgtagccagctgttctgctataggattggtttcaggaatactgccttgtttcagctgctctttgtattcttcatcagcagtttcaacccatgtttgtttttcctcatcgaataaaggccgccacataccctctccatttatttctggaggaatatcagtagcattcgccgggataatatatcttcctgactctctatcggggtgtaactcaaccggccttcctaaatagatcttatcctcaccatatgggtatattaatttcatacttctccctcctttctttaagttagaggcacatctaagtcaatataatatccattcactttagactcagtattagccattacccctgttagtttcatatcaccagatgcatatataataatcttgctgtaaccagtggttccgctagttgcaaccagtttgactatccctttgcttggagcgctagaagacgggatactagcaaatacaatctctctatcagtaagaacatgaccattaagatgcaatgtatttccgactttacggtattgtaaaggtctatcacctgtagttgccccgtttttgtatggaacatttagccacggcgtctctataaagtctaggtctgtaataacctctcgccacccagtgaattctccctctttatgctttgttccaatccatgtacggttatcataggatcttgttgcgacaattttctttaacccttgaggtggagcaaggtcagccggaacatctgtaatatcataatagtaccaggcagcatcatcatcccccggatgattcagaacacctgccccaaaataaaagccagtcggataatcaaaaaggttttgtcctttagttatctttattctctgaccgttttgggttgtcaggggatagagttgtccattattccatttgttcttatcttctttcgttacatgaatgtctgttttattttcatgagtattgacctttgtttgggctcctgctgagtattcgatttccatccaaggcgtccagttatctgatccactcaccttatttcttatgaatttccgccgattatcaggtatagaggttgttgcactggtataagctgtgaattcctgatatggataagtgccgtagttgtaaaccaataaataaccattgctattcacaggggcattcagtgccgttgaagctgaagtcatataataaaaccctgtttcaataacagtattgaaatccacgcctgacaagtttttcatcaaaccattgtcttgtgttaattttgataactgagccgcattccacttggttcgctctgcatcagaaatatgacgaatctggttatagttatgtgcgtcaaactccgttttggttgcctgtttgtcattggtaacattaccgagcccgacttgatcttttgtcaccccatgagggttgcttttatcattaatgtgttgttcagtatacgtttttgcatttttttcggctgtatcagctttgttttgcgcccctgtagtcgtttccttcgcattccaatttgaacgctctgtggctgtgatatggcgtgtggaatctgtattgtgtgcgttgaattctgttttagttgcttgctgcacgttgtctacgtttcctaaacctacttgggcctttgtgacttggttggggttatccctacgcgcagcaaattcatctgtataagcttttgctgtttttaaagcagaggaaacgtcatcctgcgttgccccgatctcttgcaattcctttagtgcatgataggccgtatactgataccagttgaaccaatccgcagggggatgatccattggtttgtatccttcatcaatggaggactgcgggggccgctgcccggcgttcccccattcaggcaattcttttgtaaaaggcataaacatcactccttaaatcggtaaagggtaatcatcttcaggctgaaagattccgccaagtgttcccccatctgtcccgtctgttgaaaatccatattgacttgtttctatagagttagcagaggacgaaaaacgaaaggtgccgtttaaatctacataagccacccgtacgcctgcagcaactgttttttgaacgatattcgaaaactgtgttgcactcattccaactttgctcaaagcctcaatgggtgccttttttacgataatggcagccggttcatcttcattattttccttgctgctgaaaatgtgtatttcacttggcttgcagttcagtgttttggctaaagcttcaatgatccggtttgtggtgccatctgaaacatttctggcaaccttgccgcgaataagcacacgataaatttcatcagtggcacggcccctatcctgcgacacgttgtcaccaagtagatccagagcctttccttttgccgcatcaatatcccgccagttctcagctgtggttagcgcgcttttaagtgctgtcagctgttcatcgacaattaaaaaaagctttccgatattgctcttttcatctttcaaaaaggcatcggtcagctttcctattaagtctttaatcatatgtgattcaccacgatttcatcaaaatgtacctgggcaacctctttaggttcaatttcaatgtttgactgtgaaaggtttgtcgcatctttccccatcctgattgttacatcagagacaccatctacttgatataccgcgttgaacaactgcgacaatataacatcatcgcccatttgtgagccggtatagtaagagccgtttgcatcaattcccccgattttataaacgaggttgtttttgatctgacttactccatcaatagggaaggaagcatttgtttttaaatccagctgcagatatattttgacttcccttgcaaaatcaaatttgacggcatggtcaagtccgctggcgtcagttatggtgacaacttgctccccgaccgtttcaattcctgcagcaacactgtcaaacagtgcttgcgcaacatcatcttttgtaccgcccagaacataagcatgaatgctttttggtgggttgccgtccgcatcggtctgcatggtattgttggcaacaatattcgccgatctgacgcctgacacgcttagcagggctgaaataatacctccgtttgtagatgctgaactgccctcaactgatttctttattcgtgcccggaattccgaatctgtttcctcgtcggcaccgcctgccgatggttccggatttgtaactgaatacacgccctctgagggctctgcctgcacggtaatggtatttgccgcaacattgtttataacgcccttagaaagcgagacagccgtccctgagcctgtcccattagcctcaattacaacatcttcaatcaattcaaaatagatgcctgattccgtagtaaactgagtttgttcttcaattacgatgccgggttctccagtaaaggacagagtcacaactgactccgcagctggctcccgcgtgatacccgagttgctgccaagacgatcgagctgcacgccctcagacttactgacaaagccgctgttataaaccctttctgcaatgtcccacaagccggcaagaaaccaagcaaagatacgaataataattcctaatggtgttttactggatgtgtttacatcctccccgaattgctcccgcgcccggtcctccatactatcaacaagctcggaataggtttgccgttgaaagcctgtttcatcaagcaagatcaacaccccctatctcaattgtttcttcatcctcttttgtcattttcacatgcaccgcaagactgcgagactctttatccattaaaaagttcaccgattccacactggcaatacgctcttcttgagaaatggcatttataatgtcatattgcgcctcttcttgatcaaactgctttcttaaaatgttgctgcgatcaaggccgacatgttcatcaagctcaaactctcctaaacttgttctaaggatcatttctactgattgagccagctcagcatcaccctcaaccatttgtaactcaccattttcaaaacaaagatccccgtctttaagcttgagagttttcatccttcccacactcctatgacaactggatcgtttatactgtgtgtgcgcctcgaatccggatcaaaggttttattgccgtccaggttatccagtgaacgttcagcaaacgaaacaaacacgcaggaccctactttaatatcagcttcgacgtgtttcaaaacaggcgcatgctcgattaaagggtattcatgtagatactcaccatcattggtttgaaacagcaatttcagatcggcagtgtgtttctcagcattgtaatttacaacccgtgctggcgccgttgtatggattgattgttttatccgctgttcgaatccgtcaaagaactttgtcgctttactcattaaatcaccctacattctgtgaaaaagtctttaccgtcaaaggaatgagagccatctttcacacgatattttcctttcgctgtcttgctgtttatttctatgattgaagcaactgcgatacgatgctgcaataggcacttcaccttataccctttgagatcatcttcctcaaattgttcaggcgtttccacaagtcctgttgcctcttcgagcttgaaacgttcgtcatccccttgactgagtggccgaataacaggacggccgcgccgataatacatgactgccccagcatcatgaatgacctcttcaagattgttttcaatcaatccggtgacacgatagccttttttataaactttatttttaggcagaatgatatttttcacttttataccgagcacacgcagaagcttatcgacaatttgccttgaggttgtgccagccttgaacgtgattttcatgtatctcttacggtatctgacctctgtccgagtgccataatttcggaccgttttatatgtccggccgttcttatctttttttacagtcaccactggttttgcgagcttgtaccgctttttcacatagtatttttcagcaggatcagcgttttcagtggttactttcatatgggtgtaatcatcgccatcttttgaatagatggccgttaccttattcaaaccgtcccaattattcagcaccttggtaactttaccgatagttaaaacaccgtaatcgtctttataaccagcttgaacagtgatagtgctgccttttttaattttgctgattgaatctttgctcaggttgtatatttcaacctttgtttcattcggtttaaagtcatcatcaaacgggacctcaaaatgaatctctaagtctttataatcgaaagtggtttgtgaactgccgttatctatcgtgaccttaacgacgcgcccaaacagcattttattcgtcgccatcgtcttctccctccgcatcgtccgagacatcatcaatataaagaaacacggtttgcataaaattctcgtatgtaacccgtgtttctgtattcgattcatccatagggataagggaaggcgcaggcagtttctcgtttacaatgtcttcccacaaagggacgttcaaaatcaatttttcgcccagcacgattgattccatgtcttgatcatataaatcaagtgaaaaactatcgtctgtttggttgtaattgatacgcaaaatgaacgtgtcatctgctaaatcaaattcaaactgctgtggtatgtcctctttgtcaaaaggaatgtaatctcttgatgccatgcctttccctccttcatctaatcctcattttgacccctatcggaattcttcggtccggccagggattcaaccgacgcaaagcatttactgtggtgccgtatttacgagcgcagccccaataagtgtcacccttcttgaccttgtggtataacttgccggatttttttgttttcttcttgctggctttcttctttttcccggctgttttcactttctttttgacccacgggctttttgcaatacggatttcttgcaactcaattgaaatagcaaaaccgtttgtgtaatcgcctgtgtcgcgatctatctttgtgatgatcacatttttagcaaccttacgcccggtataagtcaaaagagtgccggcataagcctgctttttcagatattcataatcactatttgctgttttgcctaataaatagccagagactgttgtcgtctctggctttctttgtacatggtccgtgatcggaacccctttttcaacgggatatgaagtgacctccacatccgcgccatcagattccttttcgtttacgagattaatctttccgagcttcgccaattaataagccccctctggtggataaagcgacttcagcatgtcgaaaacttcgtcaaatgtttcagttacagcctttttcacctttgtttctgccccttcactgccgccctcaacttttacgttgatcgacgggttaaaagtgatattgacagatgaactgtttgagcttgtagcagccttttctggtgtgtaaccagtatccgcgccaagctcccgaccgagtgcagcatacattccgagtgattggtttctgtatcgtggctcagttgtgatgacatactccctaaagccgttttcaccaagcgcagcgacttgtgggctgttaatgactccacctgtcgcataacctctatacggcccaccatgagccatagaaacgagcccagggtgttttaaaataccgccgtatctgctgttcaaatagttgatagcagcaaggatctggtcaactggatttttgatatttccgtgacccggttccttgtgagcgttgaatgtacttggtataaactgcataagcccttgtgatggatggccagctttcgcattcgaatcccaattgttcacgacattaggattcccgcctgattccttcatggcaatagtttcaagtgcgccagcatattcagagccaagccccttgattgatagcgcttgagctacccactttttgacggcttttgaaccgccacctgaaaagctttcagcgtaactggacattttgcctttaacaaaaccaacggccttatctttgacaaagttaaaagccccttttgcgatatcaccgaacgagccagccatagaaggtgcagagacacccattttttctaagacttttgttaaaagcttagatgggtgtccgatgtaatcaaaaacatcaagagcaacatctttcactttacctgcaacggattttacaccattccatgcttttgtgaagatatttccttctgtacctttcgcgtaagctggaactcctgataaagcagcccttgtctgtttagcagataacacctgagtgccttttgggaggttcattagtgtatcacttgcagggctgagtcccacatgacctgatggagtacgatacatttcaggaccagcgtttgcccctttaccgtctcccagtatagccgggcctcccgggtgtccgccggttccgtgtgcatacttaggtacaggccattcaggtatatgtttatctttcaaaccgatcttatcaagtacccagttcactccgccgattacaccatttactccttttccgagtgctccggcaagtttgttcgctaagctagtcacaccagacacagctttatgagccatgttcttaattccatcaccgattttacccggaagtttcttggccccttcgactaaatcattgaaacgatccataactttttgacgtaaatcaagcgccaataacgcgactttattttttatataaagccatctatcagtgattgctgaacccatattacttacaagctttttcaccatgccgacagcactagaaaaaatttgcttcactccgtcccacatcatgcggaaattcccagtgaataagcctttgaaaaccttcactattcccataataatgccgattgcaccctgtattatcgcaatgatatttttaagtgcaacttgaattattgagagcacaaccgggaacacagcagtcacgatatttaggatgaaacggatcgccggaatgaccacagttgtaatgatattcgccagaaattgcaaaagagaaacaacaatcggaagtaccgcttgtatgatttgcatgatctgcgggaatacctgctgcacaacttgaatcaaaataggaagtgctgcttgcgccaactgtaaaatgattgttgccgctacagtaagcaattgagccacgattggaagaacagccatgatgacttgtttaataatcgggaacacttgctgcaccgctgataaaattaacggcagcacttgaaccgctatttgtccgatggatgaacctaaaagctgaatcaattgcaaaacaatcggaagagcttgttgtacaatgctcaggatcaacgggaacgcaagctgaatcatttgaaccaaaatcggtaaggcattttgcacaattgaaacaaggattcctgagaaactgcctatcaattgaataatgattggcagcactgcattaattacgctcagaatgactggaaaaatcgtctggaagccttgaacaagtaacggtaggatgctgcttgctatttgcaagacactcgtccataaagtacccgacaactgcatccaagctgaaagcaattgctgaatcagtggcatgatttgcggaccgattgtctggaacgtttgcgagatagctgcagcaaacaaaacaagcgtgccgcctatttgaacgaaagcctgctgaagttgtccggccagctgctgaaactgtggcgtcaattgcgtaaccaattgcccgaaagactgttgaagcgtgttgatgattggctgcaatgcctgaaaaacagtcgttagaacagattgtaccgatgtccatgccgtctttaaggcctggcttacattttggtttgtttgttgcatgcgatacaaggcgccagcaacactcaaaatagcaccgacagccacaccgattggccctgacactccgaggaatgcaagtccgatcgccgcgacaaacggagcaacaagagaaaccatacctttaaagctggatagaccgactttcaactgctccatgaatcctttcacgatgccgtttagaccgtctgatagtcctttaccgaagaagtccgagactgtctttccggcattatgaatgaagcctgacacggttttcacagccgttttataggccgactcaattccagccactaactgtggatgcgattcaccgagacgatcccataatttcaaggattcagcctgcattttatgaatggctgtgatcgccacgttttgtgcgtccttgaatcctttcatgaatgcaggttttaaaccctcagcttctttgatcatggtatggaatgcaccgacaaccgccgatttccccatgtcagcaaagcgtttcatcgcgtctgtagctggcttgaatctttcctgaagcttatcgaaattcttgtacagcaaataaatgccggttacaaggagaacgattgcccccgcaacgacatacaccgtgcccgacatagcagccagcccggttacaactggaccaatgaacatccacaaactgctgagagctccaaggaacccattaactaaccctacccctatcgctagtggcgataaaagtagggttaaaacagggatgagaagcataaatccttggatcattttcgagagtacagggtgcgcctcattaaactgaataatcagcttcgcaacggccgtaatgcccttgtatatcgccatcgcaaacgccgcaaacacttcgattgctggctgaatggctttcagtagtgtgctgcacatctcttcccatgcctttgaatagccgggaactgtttgtgttgctgctttatgaagcccttggaacatgaaaaagtttgtaaaagccgcgcccagtgccaccatttgaaaacgcatataaccctgagtgatcatcattgtcatatcgttaagctctttcatgttggcagtaggtccgagcattttcagagccaaatgcgcagcagttccctgctttgccatgttctcaagcgtattcgatacggcaagcccagctttattgacttgatataatgggtttcccattcggtcatagttcgccgcaatcttctcagattgagtggaccgagccatcaatgtccctacagtctgcagcatgctcatgcgcatcattttgttgtttttcatcatgttgtctgttacttgcttgtgagcacgtcccagcctgtacacttcatccataaactgctgattggtgccagaccagctgtccatctggttccctaactgaaagaaaccatactgggctcggatcaattcattccgaaaaccgttcatgccatatcgttcttcatgccaggcttgacgcatttcattgagcattcgtattgtatcggcttctagtccacgggttgagccgcgcaaaaagtccatttcacggttatactgccggattccccggtagtccggggccgggacagccaccgcagccacgttattctgaacgctttgcgtgttctgctgggtaacgtttgctgcgggcgtaccgatacggctcatatcgacgttattcaaattttgcctgagttgatcaattgattcattggcgtttgttatagacgtttgatcaacattgatattaacctcagacggaaggctttgaataagtctgcttgtctcttgtacctgggtattcagctggctcaaacgggatgtaactaagtcgatttgaggccctagccgttctatcgtttgactggcagtttgcaacgatgagttgtccaagatcatactcatatggatgtctctaaaattccgctgttgcctttgaacctgagccatccgtgtacgcatctgtgaaaaactgccgccagcatcgccgacatgatcaacgagtctatctatttgctgatttgctctttctagaggggaggtatcaacgttcaattcaacgtcaatatgcgtacttcttaatgcttctgacaacgttcataccccctcatttcttgttattcctcttgttttcttgctcaatatggatgtcgagggctgcatttgcctccattagggtatcgagatccatcatcgcgacctctgagaaggagaacttcccagacatcacgagtctatacataggccagttgtcactcgccttctttttgtaatacggctttggtttgggtttcgtcgataagaaaggattgaacctctttcattaattccatgaaaccttcgtgttcatcgaaatattcaaagctcactttcggttggacaacgacttctttcatgaataactcatacatagcagctgaatttggtttacctaaattgaggttgactgcttcgtcctgaatttccaccattcgctttgttcctgggtgttgaagagtgtactcaattcctttgatagttactttcttttgtttaccgaattttgacataggttttccctccgcttgtttagtttgcatatattgaaaagcagccctattggactgctttcgcgcgtttgatttcttcttttttgccatagcttaattactgttccaatactgtatagtcaaagacttgaatctcgaactcacgatctccaatctcgtcactgaattcagcatcggcaggctttttgaccatcgcttctgtgccgccgattttttcctgtccgcccgtaacccagatagggaaacgctgggccgtgtttgccattttattcaggtatggtacaaatggcgatcccatggaaagagtcagtgtaattgttccgagtgggttgtttttcgttgcaacactgacatcacccttggcgctgactttagtcgagaacttttcttcgtcttttgcacaagaaaccattgtgccctcggaataaccggttacgattttcccgtcaatgttcgtgttgacttcgtttgcatcataaacgtacatgctttatatcctccttaaattgagatttcaccagtgatttcagcagaatgaaccgcgccagccagttcaaaagtaaatgataggccgtcgtatacacggttttttctgttttcatctgtgatttgatcacgggtttttgtgctgattgaatacactggctgcccgtctgcatcttctgcaacaatgccatttgcaaaggctgtttgcagaacgtttgtgacctgtacactcagcaatgaaaaaccagcattcgagaacgggattttgccgttgtttgagaatgctgattgtattgaggtttcaatattcaatttcacccaatctttgccgtgcagcacgtcgatatattccccggatgcagtaatgccctcggatgtctcgttgtggcccgctttggttacataagcaatagccccttctgtatgcagctttttcaactcgtctgccttaatatcttgaggcgtgatgccaacgatatttttaaatttccaagttactgatcccactgtatgtgaagcaaccgaaccaacaaggccagcgtccggatgctcgtcatttaacgggtgatagaaaacaattgtgcgatccttgcctttgtaagaagcaacttcttcccggtcagttacctgtaaaactacaaatttatatgatttctcttccatcgcttttgccgcttccattctttcgtccgctgtagcatcagcaaggatcaagaagtgccagtccttgtcgaaatactcgtcaaacgcattccgaatggagaatgttgcttgtgtagtcgctccttcttctggcgtttctgtgctgcctccatacgtaccgatggcaacctttgacggtgcattgtcaccctgagcaaagatagccgcagcctttttatatgctgctgtggtttccggatagtctgccttgatagcttctaatgagccatattctttatatgtgttgtgtccgtctaccttcgcaagaatcagaggtgttcccaatcctttaaggctggacggtttcactaagtcaattttgactgtaacgtcactaagtggcatatgaattaccctcctgtattttcaattcgtacagagtcgaaaacctctgcatttgcttctccatgagacacacgcgttctaaagcgtgtatcgaagccgtgacggcgttctgtgtcaatcgtgataaatgtatctcgattgccgaaaccgtcgttcctgacccatgccagcccattatcatgaagcttttgtcgcgcttcagctgttttgaagtacgctgctgtttgttgagcaagggaaatggcctcaatatggctgtttgaaatccatgtaaaagagaaaacaagctcgatgtcttccgttaacactccctgttcttcaatgcctctatgttggggcaaatacggggaagtcacggtatacgtacaaaaaggatagacaggttgtttccctgtaccatttgcaacgataacgacatggcctgttttctctctaatcagtcccaggactgtttgtattatgctgttgtagtccatctgaattgatcaccgcctttaagatatagctgttgaaatcggcatacgtcccataaggcgtcatcgcttcaacatcaaaggtggcgccatcaaaaatcacctgagcttttagaggaatttcgttcttgataaatagctgcctgtccatagatgtaagccggccgccagattgatagacaagttgtgactgtaaaggtactattgcccctctttcatctgacttcgtcggtttcggtggcacccattcgccgagatcatcatatgaaccctcttcagatggaataagcaatgtaaaatcaacgctgtaccgcttaatcagatcagaaaatatgaaatgattccccatcagctttcaacctcataatccatagagccaatcatttccccggtatcaaccaatggatttgaagagcctttctcttcggttgtaaatggatggtttgccgggttccgcaagtctcgggcatacacttgaagccgccctttcgcaagcaggccgactgtttccatgatgtcattcatcgaatcgccattctctaacgctctattgaccagatcctctaccttttgaacgatctcttcctcgttctcgtcccatccagcacggatgaaagaacgctccggaatgttgatatattgagtttctttcttgaggtacagcccttttgcagcaaggtagttccgcatgcgatcagttacagcaatacggcagccaaattcgtgaacagccgcgatcatttgccgttcactgtccaggattccaactttcaccttaccgacggaaccgaggtttcttatgacttctggaatacggttgctatctcgtacccggacgtttctacgtgccattagatcacctcagtgccctaaagcgtatttttctgtagggtcggaataactcatgaacaggattgagcctttcttcatcagctgcataggatctactcatgcctccaattgattcagatagaacaccggacgggctttctctgtcaatcttaattaatagggcaatccccttttttacggccggaggaagagacacagtattatctggaccaacaaagagattgttgcagtatgccatcgcatatgaaatactatcttccagatcaatttgcagtttggcatcctgcgatgtgtcttcagctggaatccctaacctgacttttaattctgccaagtccatttttctcattcctttcaaagaaccggttcatatgtcgcaaaacatcggcaattaatatcattggatggatcaccgctttgtcccggcgcttctgctgttacatgaataccatttttattgatgccaagatcaaacaactgattgaccatgcgttcctgcccttctaaatggacatgatccgcatgttttgtctcacggactctttcatcgccaacgttgtgccaggtctttttcatgttgatgccccgtgactgagcttttttagcagcgtcaagcgttgctttttcccttgtgcgatgcatttctgtattggctatgcgcttcgatcggttgtaactcaggccgacatctgtctgcagctccttcgctatctgagcaaagcgtttccgctcaataaaaccgcgttcgattgtcttgttaatctgctgtattgtctttttgcgatcagtttcaatggctttgtccatttgtttacttttaatagcctgctgaacgtctccgggagcccattcagcaggtaaattcatctgattcagtgttgcttttggctgcgcaagtttgatccctaacgcagccagaacgccaaatatcagccagctgtaagatgattcgtaggtttcttcaaggaattctataatcatagctttgactttcgctgaaagatcactaatcaacgaggtgatttcccgctttatacggtttagatcaccgtgtcgattagcgtcagcaagtgtcggttcttcgatttgatcaagcttgacgaataacgcagtcagctttgacagcacctcttttgaagcacgctgaaaaagccgcttgagtttccgtaagaattccttagttttacggttcaacggcttcaaaagctctttttcagtttgttctttatccaccgcttaccctcctactcctcggctgtttctttggcgtcagactcttgtgtgtcctcggcttcttttttatttgtgcccttgtccagcttatatccaagtcccttataaattacctcgaaagcacgttccgtcacttccaaagagtctctccccttcttgatcctaaccattaggcagtggcacctccatcaacagcagggactaaggctgcaaaggcatcctctgcaagagtagtgaatccgacttccatagttgctcgaagtgcgaacatgtcacgctcgaataagtttagaggttcgccggcttcatctacagttgttgtcaacgttgcatcctgagaaatggtatattcaatgtcctgaagaataccataacgcgcatagtcccaagcccctgtaataaggtcagcttttgttttatcccatgatttgctgtcaacaaacccaataggcaacccaagagcttgaggtgttgcatctgctgtcacttggttaaatagtggcagcccgttattatcttttgcagcgcgtaacttttgacggaaacgtctaatagttgtaaatgcatcaggatctttgtctgcatcttctacaagcgccattactgcagcgagatcgtcataaacagttgcccctgaacccgcgccagtaccagatgtgatcttttggccggacttgttgactctttccatgattgatacacctgtctcaaaaggcgatcccaccccaaacagtgcggcttggtcaaacttgattgcaaaagcttctctaatagctgattgcatttgagtaaagaagtcagcaactgtgtagcgtaagaattcttttgaaactggaatgataaccgcaagtttcttcgatgtcatttttgctgtgagccatttggcgctgcttgtttgaatgcgttcaccttcaccaacccagtaagcgccaggtccttctgctaagtacgtgaatgtctttaccggttttgtcatcggttcatatttagcaagctgtgtgattgcagatgtctgcataaattctttcaacacaatttctgcttgttcttctgggattttcccagttactgcatcttgtagtaatactgttttgggattaaatgttggcataatagccctccttattttctgatatttgcttggttagcgagtgccccaatatcaaccgccccgccagctggtgttggatcacctttttcgaagttagtgccgctctctttgaatttgatatctacagcattttgaactgctgcattgaatgtctcttcaaacttactgagattggcaagtgttgtttcctcgtcttcgccaataaaatagtcaataactcctttaggcagcttcttttcatccgctacattcaaggctttattgaccaatgcttcacgatttcttgctttttctgcatcttctatttgttttttgagcttctcaatttctaattcagccggagatttatccggattgcgttcacgaattttctcttcaacgatgctatccaaattgtttgccttccatgttgcaagaccttttgtgaagtaggaatccaggcgtggctgaatgaatcgttttccctcttcagtttcaaggaacccttccaccttatctgctgatacggccgaaagttctcccacaaatgcttttacttgttcattgtctttattatcttcgagaaattttttcacttcttctaaagttggcattacgtttcttcctccttcgccctctacagtacgcgcctgttatgagtgcatgaaaaataagcctttttaaagtcatgctcaggacaaatacagatgatcactttgcaacctctttgaagtcatcctcatgtcgattcttatgccagtttctcgttgtattgtattcatttttcgctaattcccattgccatatatctatttcagcaggcggattctctccatttgacaacgcaattgctttctccatagctttttcgaatgtagggtagattcctaccttatggggatagcagtcataataatcatcactcgtgtactcaacttcaaagaacgtcattacttacacctcgaatgtcatcattgtccttttcatcctcaaaatcataagcatcttgttcagctttcattctctcaatctcgtattgcacatcatcgacaatagagagtgttgaaaggcgtgtctcttcgcttacctgacctttaagttgtccggatgtctgagcctcttccaagagatttgacggcagattgcgcttgaatgagaaccatacctttaaataatcacctgctgatacaagaccttttttcgcccatgctgagcaaagcaatttgtactgataccgaagggcagcagtcgttttcctctccatcgtgatgcacttattttcaagggccatcagcttgtatttcattgcaacgcctgtcacattcccgccgaatgattcatcagagaaattgaccgactttgcaaaacgaagaatgttttcttcaagcctgttcagatggttttcgatcatggtgtcattaatgtcttttgtcaggaatttggcatcatcatctttcccaaacatttcaagcacaccggtctttttcagttcttggatgtcttcatcatccataccagcgccctttaaaatcaaataagctagccgtagctgttcaatctcgtttgatgcatctgaaagtgtgcgatcgtatgcatctataagtttaattaccttttccacgtcgcccatctgttcatcattgttaggcaacccgaataaaggacaataatcaaacaagtggagcttcttctctaataaagtccagccacctttttgtttttcgaaaaaataggccatcttgtcatcgtaaaaagtggctttttcacgctctatgctttgattattgacccaatcaaataccttataatatctaagtgcgaaagaaggctctgtgatgtcattctcagcaataatgacaacttcccatggatttacattcgcaactcttaccgagccgtcaggagcgatatacacaagtctagcaccatatccacaaatagctgctttcttaccccattcgctatcagcatcagcaatgttatttatggtgttaaagttattgatttgctctgccaaggccgtatttttgttttccccgtctttctccgtctcgtatgagattggatggccgaacatatacccaacctttgtatccactatctcagcatcaaaagcattattcaggcggttgtttaccagatggtcaatacgccgaacctttcctgtttcaaaatcatcgaattgagctgcctcccgctgtaagatcggcacaccggcaacactagccatatatcgttcatactgagctatggctttatctttgatcggcttatgctcttcaataatctgttcaatgattggaccgtctatctcattatttcgaagataatttaaaaacttgttcatgttctcacccctttcctttgcgtctcataggtttgttgtgtgtataaatggcatatcggatagagtcgagcacatcgtcccactctttaactggctcgcctgtatttggattccaaacatacataaagatctcttttttaaagcgactaactttatcttcaacaataaaaagcagatcccgtttgaacagccgcgccacttcttcgatacctgaaacaactgccttatcagcatctaacgcacgcaacttctctctgcgaaaacgtacgatgtgttcaggccgagctgtatcacaatagaaattaatgttgccgtaccgctctttgatgtctttcgctaccttcacccagtagtcaatctcttcgtgccgcttgcaatgttcttcaagcaaataaaaacacccttggtcatcttgtccgattacgacaatagaacccgggtgatcatatccccagtcaacaccagtaaagtatttagtgaagttgacttgtttatcttccatttctttagaactgatatagtgcttgtctttgttaaaatccttgtatattacgccttccggagcaacccagtagccgtaaatatccctgtccgtaaacatgccgctcggtgttgaagcaacaatactttcgacatactcaggatcaagaaagttgttatcaaacaatgagaagtgaaaagaacggatattcagcctgccgtttttcagccgctgcccgtctttgtcgatataatccgttttgacggtgtgcattgggttttcagggtttgtatccatcatgaccattgcacccttataggagcaacgagaaatgacttccttcacgaatgaatcatgcagggcagtcgcttcgtttaggaatgcgccagctgatgtgaaaccccgtgcctttttccatgagtctgcatttgcaccatcaaagcaataaacacggtttccgaatatctcaacggcattcgctttatcaaggcgcaattcttttccaaggatcagttctaaatcatttaggatattccgctttatagaagcctgagttgccccgccaatgataaaagaaagccccatgttttgatatttgctgatgtgcccgaggaacgtcaaaaggagcacgaatgttttccctgcccttttcgccccgctgcatattaagattttcggctgctcttcaataaagctgttccatacttcttgttgcttagagttaagttccatgaggtttcaccatcttccgaagcatggcagcaacttcattttcttgagagtttccgttatcaccatcaatatctttcttcgccttctcgatattcaagcgcatttgctccaatttaaggcgacgttcgtcttcttcatgcgccagtagaacaaactgttttatcaagcttctgagctctcccattgcccgagattgagcattcaggaatgtggcctgacgatcccaagcgaactgtatttcaagttcttcctcaacaatagacttttcaaaatactcgtttccatcttcgtcctcttgaggttgataaacgtattttgcttttttctgttcttttacaagatcatctttatcttgtacgaacatgataggctgcgcccgaataatggctgcatattgaatctgtatctgatcccatataatatcagcaggcgaccgttcctgaatctcttccatgatttcaagcgtttcttctggcaggaatttagagaaaaagccgtgagtcatagcgttttgattcctctgtggtgcgccgccgttattccctaatgcattcttattgccgggtggtgcgcctgccttttttgtgtgcacacttttttcagtgggtgcacccttttttctttcccaaccatgccgctgtttccacgattttatggtgttcactgacaccccgtatttctcggcaaggtccttgtatttcatacctttgacgtaatctttctgcgcctgaatgtgcttctcagccatctacattcaccgccgcccccttttgaattgagttgttttggaaaaaatattccctctaaaccaccaccgtgctcaagccgttaaccgccaattgtctatcctgagacttaccggaagcagtttacagagaacataaaaaagagccatatagtttaatggctcttcctttattcaacaatttcaatatgtgtaatttgagttgggttaataagaatagattcaccaagatcaatcagacgatttttcaaaactctttcaccatccaattcatcatgaaaatagtctataagattttccacatctttcatatcttcataagaaatttcaaaagattttttattactcattagtataaacactttcataattttcacctcccacctaattatcggataaggagtgtgacaagggaactatttgcaaaatttgtcgaacgaaagcgcccttcataaataggtggcagtcgtaagacaaaaaaagcatccccaagggatgccttatttaatcaaatctcttaattctttaattgtatggaaccattcgcaaaatttgtcgaacaaagacaaaagaatatcactttttgtttcttttttttcggttgttttttgtctgtgtttctatttgcacactttcagtttttttgtttttcttctcttcagtttctaattcttcaattgcttcttctaatagcattttataagtacgtagttttccataataattaagattttttgtcacaatccatatccagagaccgattaaaattaataataaaatcccgttaaatattactatataccttccgaaggttaaacccgttttcacaatagtatctaaaagttctgtcggatctatagaatgttttttatcaatatttactgctatgttggagaaagcattaaaagtgttaaaataaaacgtaaaaatacctattagaacactgatgagactcgtaaatagtgatgtatatatagcaaatgggatagttttaaaagaggaaatgtctcctgaaactttaaggctgttattcaatctggaaattaatttttttatttgttttggttctagtttctttttgactttctttttaaaatcttctccacttttaatattggaatcctttttataaggtgtaccgaaatgctctaagtatttagatacatgagttacttcgtcaaacggaatttctctaatttcacgattatctttttttcgataattaaacacttttctccataattcaaccgctaattttttcactatatcacctcctatattttatcggacagacgacaaaacttcgaattgcttgcaaaatttgtcgaacgaaagctctattcaaaaagtcagtcttaagacaaaaaaagcacccttcagctgcgggtgctcatttcttcctatgcttctggaattccaatatatcctctttaataaaaagcctgtccctcggcatttctttaaccggttcaagttgaccggttttaattagctgattgagatattgacgagtaaagcccaatatttcaatcgcttcacttgtattaacgatctcctcattcaagaactttttaattgcatcacgctctttaaggctgtacaccaagcatcatcctcttttttctcgatatttttgataaagggaaattgacttttccacaattgaaacagcaaacaaaacaattatgcatatatctaaagttgtctttaatggactggctgcgacatgctgtcgaacaaataacatgtatcccaaagcaagaaggacaaaaatatcagttgacattcttagtttttccatttgtttgaaagtggctgctttcatcgttatataattatttgtgtcacttatgttatacttggagcaagggagaagctccaccttctccctcggctcaaaatcatctacgctttcttggtcgtctgcgtcttttgattttgggcttttttgttttaagcttttctcttatgataagagctttttcaaagatagtgagtgctgtaagtatgatgcccagtatcactgcaattttagccactttcgttcccccctttctatactttaattatatacgattactttactcacgtcaagttaatttagagaattttttcctgttttctcataaaaaacacctattcatgctaaacagaataggctgtgttctgctctatttttcattttcaaacgggaacgctcaatgtttttctggactgttccttttttaatgttcagcagctgggcgatctcctcgaaagacatgttttgcacagtatgcatgatgaaaatgtccttctctctttcagtaaggacagaaagggcatcagcaattctttctttgtcccagtcgcttacctctccttctggctcctgattgatcgcatactcttctggcattgcatcaatgatacgaggatcagcaagaatcgttctttgataaacgtctcttctgtcagctccccggcgtgctcccggttgtctcccgttctgcagccattcgagagtgaattcaatatcgctaatcatactgccaatgattttcttatcattcttttgttccgctgtcatttcattttctggtgtttctgagaatgcccggtacatctttctcgcttcttttaacgctcttttgtattcaatgattaaatcctgcatgtttgtcctcctcttatttacgcttaaaagcgccgcctttgcatcttctgagtgtttgcctgtctcgcctgccaaaacctttcagaacgctccttcgcgtttttactggactttttcttctcttgtttcatttcgtccctccgttcaaataaaaaaacggacaccaaccaaagtacagaattctctgtacagtgatcagtgtccgcaggctttccatcttggactttatttaaattaaatgttttttcgctatagtaaataatggcatagctatatcaaataaattcttctcaccaacttttttatagactactatatttccatccttcgttaacaagacacttagaatatcatcttcgttttctattggattcggcacatctaaacgcaaagcagaaataattccatcactttcttcataagaactccaattttgactcgcggtaacagtacccccacctaaataggcaacttctacatcggctatttttaaatctctccaccaaccaccttttattgcagcattatcattttcttctaattcttcttttagttttcttaaatctatagttatagcttgtgagttatatcggttatccccacgtcccacagtcccatcgattaatcgcttaatcccgtgttcaataattgattttttggaaccccaaaaatataaaaaatcatcatctgatttagccacattgaaagtttcatcagcagaaatagcaattatatcgtgtgccgttccatcttccaaatagccttttcctgtaaatgaatctcctattggatgtattacttgatacttttttaaatcttcttctgtatattcagtactacctaggtttttaagcgtagttttaaaagattgactttcagaaccagtattaaattcatttgtttctaatggtaattgttctgggaaattgattaatctctgcataataattgattgcggcatttaattctctcctcacaaaatcaatttaattactttgtccaaagctttaattaaagatgttctttgatttgtcaccaaaactatattcttttcatgcgcacttaactgtacaccaggattacttttaattttaatattaaaagataatatatcagatggcttaacctctttaataaagtgttttttcatgaagtcaacttttttagtgtttttagcaactttcattgtatacttattctcttccacccctaaatcatcacaaatcctctggtaaaagtgaactataaaatcttcaataatttcttgtccatttttatactttaaagtagcagatgcacttacattcaaattcatctgaccaaaattatctgtttggataatcgagaaataaatcttgtatggtttaatgtacattttaacgttgttaaacttatcaaaagagacttcgactaactcatttttgcgccctgtatgacctttattttttagtaaatcataaaaaattgtttggacttccgtataatcatctttaattttttgtagagttgaattttcgactatgttaaaaaccgcttgaaaatctatatcaaaattatcgaaattaaagtgatttttcacccatctaaaacccactctaaatttttgggatttgtcatatatagttttaagtaaagctgctaatgttggtaaaataatgattcctgttgcccaattaaatccttttgtgtaaaactgaaaaagcattgttgcaagaagactgagtagcattaaaacccacatcatctagcccccttatctaataatgtcattaattatagccataagatattgcttggtaaacattctttagaattaaatcaatcaacttcctctgtctaatttacaacaatgtttatcttttccacagttttcagtacaataataccatttattttcatattttttctaatttttttcaccctttttcacccctccatcgttttttcttttttgatgaattattttcaaatctctatttcctcctcaactcaacgcccatgctgcagccgcatttcgggcagcgtgcatctgggcggatttttatatctaattcgttgtgaccacattcaggacagctgtattcgatcatggtgtcaccccctattcccagccgactgcaattgcaaagaataaaaccaaaaccatcgccccgattagccagccatttgtcttatcacgctttgcaatgattgtttcatcaccgatcattttcaaatcgtctgactttgccacgagaactggtatgtaatctggatgcactttcaaatattccgccgcctgctcaactgtcatcgcttcgtctttcgtggctttgactgcccgctgaagctcaacttgtaaaggaatcatttcgcatcaccttctttcccaagcgaatcccaatcaaacgtttcaagaatcttaagcaaccgttcaacttttggtgctctccaagctgtcatagcgtacgtatgagcttctgaagtgtaatggtgcttgttcaatttgatgtggctctttgcttctgcttttgtcaaaaacattgtatttggttgtataatgtgaacctttctttctggaattaattctgcttcttcatcaatgtatttttgaatccactcaacagcatcttcatagtcgtcctcaatttcttgcaactctgttaaggcttccttagacagctcactatcttcttttatttcttctagataatcatcaaaaacataggcttctgcaatatatggcaggtatacagaataacgctctgcgttttcctcccgagcttcaacccattcataatcaccgactgtccaaaaccgtggtgcagcttgagaatcacgatcctgtgttttcaattcattttgaagctctttcaaaaattgaatatccttgttcatttcacatcaccctccaattcattttgggcaactgttatcgcgaaattgagattggtaatgatcttctctaatgcctgtttgtatcgtttcctatccccgcttaaatgctgaatgtccttttgagcctgccggaattgatgaaccgttacttcctgctggcgtttgttttcctcgatgatttcccgctgtttttctactgattgaattagaaattcttgatcctcaagaatagtggaccaattaacatcaattttctttttataaagtgaagttgctattgaaaatctattttttatttcctgtaatttatccatgccgttcctcccccgcaggggaaagcccctgctatttgattttgaaacctatttcgtgatcgactcgagcaaagcttccctttgccgtttgaatgattgttttgccatgctccggggcttccaagacatgtgcggtgccctggctcccgtctaaaacgatgatctgtattttgcccgactccattgcctgttcgattgttgtatctttgcttaaattaatttctcttgggttgtacattcttagcgccccctgtgctatgatagaagtaccagttcatatcagagcatcggggcatacgcttcggtgctttttttgtgtttaatagtgatccggtttccatccagtcattgtgaatgttggcgatggtttcagatcctcacggtaaacgatcgggtgttttttcacgtattcggccagctgttccggcgtcatcttccattcttcaaccggtcctggcaggtaaggattgatgctttgctgttccatggtatctacctcctgaattgattttgggaatttccgtgccgccgagcttcttgcaatcagaacccattcggctggcgcatgccttaaactgagagcaacgtgtcatacaggccatgagcttatcttcttcctgcacccacaacggccgatcgtctgcgattaccacgtttagcagtggactttcccgcctttcttttgagttttttcagctcgtccagctcgatgaagccgagtgacttatccagagccagcaccttgagtggcgtatcgtaaagccgctcatacagcttgcgcttgatggcaaattcctttgtttcaacgcccttgatgtcaatgatctcgatgctgccgtccaagttatgaacctcaaagtctgcaatatattcaatcttccgaaaagttttgccgttctttttgaatgcctcttgcagcaggaaccgtggctgcagcttaaaatctttgatctgcttgctcaccttgagccatttcagctgctcatagtatttggcttcggcccggctgtcgaacgtgatgccgtctacctgtgtttttcttgcgccgtacttatttgctggcatgtgatgcctcctgaaacttattcttttgttctgcaatctccatttctgacatgccgcagtcaatacaacattcatagtcaggtatttgcaaatgaccttctcccggcatagtgcagtaactcatttccatgtgtttatgttcacaggattcctgacgttttttctgttcagcctctttgacaaccgagcagtattctctttcgtgcaacctagcaccgtgctttgtcatcagccgctttccgcaatgttcacactggtaaagcgtctgattttctaacactttcattctccttacctcccgtcactctcttcccattgctgaatctgcttttcttttgctggcgccgttagtatgattgccggcagcagcatcaccgctttaagcactcggcatcagctccatttgtctgatcttttcctcaagcacctggatagctggtgtgaggtccttgccgcccttttgttcagcaggcccgaacaaatacattcctttggatcctataacgttcgttttctcgttcaatcccaatcacccaatctatgatttaattccatccggttgccctgaatgatcaccgtgtaatacttgcacatctggtaaatccgagagcccagcgcctcgtcaacgtccagcagatcgtccgttgtgagctcagaagagatcagcagaggtttatggttcaggtagcgataattcacaactgactggatctgttcgacttgccattcagttgcccttggcttcccgtcaactggcttgaataagtcatcaatgaacagcacatctgcttttctcatggcgttcagctttgtttccagctggtcaaagtcatttttcagatcactcatgccctcaacgtaagggaagtacaggcagtgagttgatttcttcttaatgagattgttcatgatggccgttaacagatgggttttgccgctgcccggctgtcccagcagagcaatgctattggcacgctctcccttgatcttttcaaagtctttgaagtattcgaccgcacattcataggcatctttaatcatttgaggtttgccatctaatttgaagttgccaaacaacagcttttcgaacttttctgtaatgccgctggctgccatgagcttcgctattttcttttgtttcacacactcacattgtttggaatacgtcgttttccattcccgagccttatccggcgtgcaaacctttcctgcaaggtaatcatcttcaagaaccatttcatcaagtgataggctgtccaatggcttgtgttcttttctcaaccgcagctcagtgtctttgtggatgcggtagatcacaacgccgcgatccttgcactcagagcattcatattcaaccttttcttctgattcggcctgttctgtttcccaggaacgcgatcttgcttgaagacccttcatcattgcttggaacgctgtgtctatactgactgctttgtttattgccatactgttgtttctcctttctcttttggcttaatgggttggacaggatcgcctcaatgtagttcaagccaacgttgctgcctttatttctgaaagcctttttcattgcctcgatgaccttctcttcgccgtaatcatccaccatgtagccgattctttgcgcctcaatggagccgatagaacgagcgaccttattttcgaatagctcaaaagcgtttttcatttttggatcaacctcctgcgtttcttgtggtgctggtgcaagttcaggaacaggcttttcagatggttcctgctccgttacaggcgtttcaaatgagatcagcctgtattgccctgccttcctcccctgcggcttatattcaattcttttaagatcaatcagcatctttcggtgtttgatcaacgtattttcggaaatctcaatctttgcttgcagagtggtatttgaagtggtgaaccactctcgccaccctgccttattgttgatgtgcaaaagatgaaaccataatgcttgagttgtagcagacaacggattcgtttctagccaattcatgaagccgttcatttctttcaggtagttcatggctcacctacttcctttcacacagtgctgtcattccgctgatacggactaaacgtaagccaggttcatttgttctgagatagccttcaacataagcacggaacagctgcgcgcgatttggcgccccttccgtcagccatttgtaacagaaggggatgccgactttaatcaaatgggaggtcatcttcgctgatgtctacaggcttgccgtcaaaaggatcagcgtcctgcgcgcttggtttttcctcagatggttcggcatcaatgatttctggctcagacatttcgtcagtgatgtcaatgcgctctcgttcctcgttatcctcaataactgccttttgcatttcaacagagagtatcccccacttgctgagcatggattttagaacggttttgagtgccatcgcatcccagtccttgccccaaccgaagtccgacttgctaaatttctttttgtgtttctcaacttgcgcctttgtccaatagacagtttttcggaatccatttaaaagctcaaaataagcagcgtaaccaataaccgaatctgattcccgcttttcaaaatcaatatcaatttcctcggtcaacggattccacttttgcaattctccttcatgaaccggtatgcaattgatagatttatattggcccgtccgcaaagcaagctgaatgtatcctttgtaaccaagctgaaattgcgcacggcctttatacggaacgatccaggcataacctaagttcttatccactggcaaatcgagcgttgccgccaccatagccgatgaaattacactcatagggtctgccttttgaagcgtattttcactgttgtacaggctcagaattgacgctgtgaattgagacgctctttttcccagaacttcttcgaatcgattcatgactgctggagaagaaagcaggcccttcatcgttgttccctgctgttgtcctggggcactgttttgtttcttctgaatgctgtttttaagcgtttgatttgtagccatattcagctaacctccttaattccaaagcgcctgaattgcacttcttttgtgactttctcgtatacatctggaaactgctctttcaatttcttgctatcgatccgattagttgaaactgacttccagctagtttgatagtttccgatgaatccatattctgcttccttcatttcatgtttgatctggttttctaattcctttgcctgcaatgacagctcgttgatctgctctttcagctgtaaatactgctgaatacgtgttttattatcagatgtgagatcaacgactttgccgccttctgcttcggcataacgttgcttgagatattcttctgcagcactcgaaccgtcaagaaccggagcctttccgcccaagaccttttcattccaaaattcaatttcggcctgaaagatcattgcaataagctcgtcatcgcgctcaatctctttccaaacgaatttattgccgccgatcagtacagcaaaatatgcttttttatattcaggccccagcactcctagatagtgttggacctgaacaatatagctgtcaggaatctcgtcatcttcccactctttcaggttgtatgccgatgtggttttgcactccaaaatggctttttcgccaacaatcattcgatcaacgtttgccaatataaaaccgtgcttaggatgcctgagcattgcttttctccgccttacttttttgccgctacgtatctcaaactcttttgcaacgatatcttcaaggagtgaaccgaagtaggctgcctcacttcctgattcactcacaggtacttgacctgttttgtctaaccataattcaaacggtgttcgccatttgtttatgcctaaaattacagaagcatctgaaccgccgatgcctttccgtcgctcaagaagccattcgtcccgactcatgtccgctgtcgaagcgaaaacctctgcttgcatcagagcagccccacctttcttttgtaagcttccgcaccaagccgctgccattcccggtagtgatccattgaaggaaaactaaactgcgctttaccgtttttggcgaatacaattgaaccgccgacctgtctcaaacgttgctgatcctccgcacgctcgctgaacgccactttaactgctttagccatgtataaaacctccattgattttcttgaggctatctggtagaatattgatatatgagttttcagatagcctttaattaagtccactctgccaagtgggcttttttattgctcatttttaaattcaaaaccaagatgctcctttaagtaccgctcaaggttttccctcaagatgacttcaccctcagcgctatctatcacgtaatcgtcgaaaggcgttacttcatccccgaaaaaatcctttggtgtttctggctcagtcagcttgtcgtgccaattgtttagaatcatcgggttttcgatcgtcattcatattctcctttctgtaattagctatgcgttcatcccaaatcagataaagttcgctatgatttcggattctttcacaccatgctctgacctccaacgctgtcgctggtttatgaacaaagtgaaccatcatcctaagctcctgcgtaccactgataaatcaattccacgctgtttcagcctcatcgctgcatcatataagcatcccttatttgaaatccgtttaagatcctcaatgtttgctttgatactgccaaggatgtctaaagcttcctcgtagtcgccttctttcaaagagtccagtaatagttcagccaaactttcaactgaatctgatttccgttttacgacttcttcatctgacttcaaaaaatggttgagtttcatacgagcatcgccttcctttcctcttgttttgacatagcaacttgatccattaacgctttccgcgtccatttgtctgcaagctcctgcattttcagaccatgacttcgagataaagcataaaagagagtgtctacagctggaccaaggtcaagaatctctttaagatccgccatcggtagcgcctcaatacggccggggcgttcattcgccaaccagagcgcgatattttcagcagcctcaagggattcctttgtctgtttcataaaattgatcagggctttactggggctgacgttcaacgccggatcgactggggctgttgccctcggatgaagccggaacaagtaatgtacaaggtcaatgtgctcataagcgccgcatatctcaaaccatttgatgcaaagttcaggcgttagtgtggtcaggccattttcaacgtctgatacataccgttgatctttgccgccaagtaactgccctaattgaaattgagtaaatcccattgtctttctaacctctctcataatttttggtaaattatcgagtttatacgggttgttcgacatatgttcgcctcctgtttcacggggaattatttggtaaaatttaagtaatgaaggaactagctggcttgctgttttttcagcttattgatgatgaaggcttgtcccttcggagtgatgcgcattgtcagccaggatttcggcgtcccgtttacttggcgcaccccctgtgcgatctcaaagaaacctcgctcgatgtattcctggtatggctcattcttgttggccatgatcatcttccattcgcgcagcttctgaaacagtcgcttttcaccaatcatgatgccgtttttcgaagcaagctttgccagttctctcacaagcaatgatttttcggccgccatgcaactctgtgcaaagttgaccaatggttcctgaatcttcaatgcttgttcaagttgctgccgttcttcctgctcgctgatccatcgctttgcccggctgactggatcttcgatcatgtaggacggttgagtcattttttgaagctcggcttccatccggttaaattcagcaatgtatttttctttgaacactgctgcttttgcacccgtataaccaaaaaccaaaaatgcgagtccatcacgtttgatcagatattttttcaatgatcgtcctgttggatcttcatattcactcaacgaaaaatttcgttcagtaaaatctttagagcaattcagtgtttcaatgctttttattacatcggcgtgtcgttttccgaatacctcagccactgttaggctgtctgttacggcttggttgccttcaataaaaacaatttgattcatgctgttacctccttgcttgtccaccaaaaaaaggtgaagcagataattaagcgtgaagccttaattcttttttagaagtgaagtacggctcaagagctttacggaaacactcttctctgtccatcgttccgtaatattctttgcccatcttgatgtttgttgtttttttcttagtttgtttcgccatgtgatcacctcacgtcagtgtattcgtgttggacggttggactaaccaagaaattaagcagattcaagatccccattcttcatttcgtggcattcttcttcaaaaaaaagagtccaatcaaaatctaaaatgtttgcgatcttttttgcgacatgaggtctgacattcctttcgccagtctcaatggcaccataagttgatcttgcaatgccaactttgatggcaagttgttcttgcgttaaattggcatcttcacgtttttttctgagccagtatttcaattaggatgcctcctttcgttctacatatcgtggcttatgaatacatattaaaccacgatatgtagaatgtcaaacctttttattaaaaaacacgtaatattttcttcatttcgtggcatgtcgtttaattccacaaaatgtagagttataatgaatttagaatttacctttaaaagttagtaggtgatattatggcgattaaacataggctagtcgaattgaggaaaaagcaagggcctcatgtgaagcaagaagatgtggctaaagctttaggtatagcacgctccacttacggtgcttatgaacaagggaaacgcgaaccggaccacgctactctaataaagatagctgattattatggagtgactatagattacctactaagagatgagccagagaatatgaaaaatgaaatcttcaacgaacaagcaagaaagattcttgaagatcctgatactctggtagctgctgctgatggaaagataacagcttcaattttagaggcagctcaaagaattattgctgagcaattaaaatcaggtagacaacccggagatataaaaaacgggaacaaaaaataattacataacgatcgctttatctttatttattattattgtttagtttagtttagtttaattaatgctgaacacttcgcctcaaaatttgaggtaaactattcagttgaaaccatttcaacctcaatttttgaggtgatccatgaggttatttctgcattcaaccgcaaattttgaggtaaaacattcagggtttttcactcagattttagagagaaaaagtaaaaaaatcctttatttagacgatacaaagaaagagattgcacttcattataaaaggggaaattacaattgaaaaaatggttattaggtattggagcattgactcttagtttttctttagctgcatgtagttctgactcttcaagtagtaatgaaaaatcttcttcaagcaagacaagctcacttagtgctgaggaccagtttaaaaaagatgcaaaatcatatgcctatgaaaaagtaaatagcgccggcattaagaaagggacaaaaattgtcattgaaggcgatgttacttatgcagataacgtcaatgatgatggggatacagtttctaaaaatgttgagtttactgtaagtaaaaatagcgatggatctgaagtttacacagtaagcaataaaagcgctgataagttcaaactaaacgatacggttaaaatttatggtacatatgaaggcagagctgaaggaagtgcccttcctaaagtgaaagccgtttacgtcgataaaattgataaagaaaaagagcaagctaaacaagatgctgcactaaaagaacagtttgaaaaaactggcgaaggtgatattgaaggactgggccacgttaaagatatcggcgttggatataacgacgaagtcggaattgacggtaaagacactcctataaaacctgttacgatgggcagcatgaagctttatattaacagtgtcgacgttctcgaaattcaaccagatgatgatgcaaaatcactttattttaatgatcaagataaggttcgggctattgttgtcgatatgaaggccgaaaacacttcttctaaggacgtaacgtttgaccctaaccaagctgttattgttacaaatacaggagaacagcttgaatctgaaatgggattaatgggtgaagtaggcggagacttcttagggaaagttaaaaaagaaggccaggcatggtggatacttaaagataattcaaaagatatcactagtttgaaaatgattatttctcctccaagtgatgcaaaaacctatgatgatttaggaagcgagaaaagactagattttgatatcttgagttttgaagaagctaagaaaaaagattcaaattaaattgagcccctaaagggggcttttcttttcgctaaaaagagaacatacgtttgttcgccttcgacaaaataggtgataagatacaataaagcccatgataaaagtcacatctttggttatttaagggaggtttcatctttgagatacactaacagccatttagaagattggattgaacagctttacagggagatcaatattacaaagccacatgagattaattttgatagaattgctcaggccttggacatcttaattgtttacaatccggaaacgagttttgctctgcgattcaacggcatgtatacaatttctttagattcacgaaagacacgacaggaacagtggctggattttgctcatgaggtttgccatgattttagacacatgaacgatgataagatcatgcccgcttcgtggaaacgttatttagagtaccaggccaattattttgcttatcacttttgtatacctactttcatgctccgagcaatggacatcccccgtaatctatacgacgcagttcaagtcattgccgatgccttcaaggttccagagtcatttgcgatgacccgcatcaatatgtacttcaataaaaaacgactcatcatataaaaaagagcctctaaagggctctaagtttgcgaccggtatgcataccatttgaaatatggtttcgaacggttttctcactgataaatagctcgcttgcaatctcctttgttgtcttatcttgaacgagcaattcgaacacttctctttctcttttcgttagcagcggcttcgattgaaattctttctccttcaagtattgtaaccctccttgctaaggtgagagcgaatcagaaacgaatgggttttgatatagtcgagatatcatatgtaagaagggcgcaggaggtgacgtttacaagataattagtttatcgtgtatgaagaagcgtttctttctcctcatctgtccagctgacagctttgccgctttcctttgagacttgaaccatcacgactgccccggtgaagcagggttcgccttcgaggttctctccgagatagtgcaaggtaagagatgaactgccgactgcgcttgttttcacatagatgcgcaactcttcataaggcatgacttggcgcaaataatcgcattgctggcttgccacgactgtcatggtctgtttgttttcactcatcatattcagctttttaaaataagaaatccgcgcctcctcaaaatatataaaaggggttacattattcatatgcccaaacatgtctgtctcggaaaatcttacggatacctcattgaaaaaagaaaaggatgttttccattcttgaaacggcatatcaatataagcgggaagcttcatcttttttcatctccttattgtttaaaaaaacctctcccatgcggaagaggttttttcttcttatactctgtcgcttccgaagaaattgcggaacgcttgtaagtttgtatctctattcaaggctgcaatcgaagtggtaagcggaatccccttcggacaggattgaacacagttttgcgagttaccgcaatctgcaaggccgccttcatccattaatgcttctaatcgttcagatttattcatggcgcctgtcggatgcgcgttaaacaggcggacttgcgacatcggtgcaggccccatgaacttcgatttgctgttcacattcgggcaagcttcgaggcagacgccgcatgtcatgcattttgataattcatatgcccattgacggcgtttttctggcattctcggccccggtcctaaatcgtacgtaccatcaatcggtatccatgctttaacttttttcaatgaatcaaacattctgctgcgatcaacctgcaaatcacgaacgactgggaatgttttcattggttttaaacggatcggctgttcaagctggtcaataagcgccgtgcaagactggcggggttttccgtttatgaccattgaacatgcgccgcatacttcctcaagacagttcatatcccatgtgacaggggttgtcttctcacctttgacattaaccggattccggcggatttccatcagagcggaaatgacgttcagattcgggcggtatggaatctcaaattcttcatcataaggcgtgctgtcagctgtatcttgacgtgtgataataaatcgtatggttttttgttcactcatgattatttcgccaccttcttcttcgagtaatcccgtttccgaggcgttatcagtgatacatcgacatcctgatactcaaattccggcgcttcatacgggcttacatgtttagccattgttgttttgagccattcatcatcattacgttcaggataatccggtttataatgggcgccccggctttcattacggttgtatgcgccaagggtaatcaccctagcaagctgaagcatgtttgagaactggcgtgtgaacatcgctccctggttgctccattttgtcgtgtcattgatgttgatctttttgaagcgctccattaactcctgaattttgtcatccgttttcaaaagcttgtcattatggcggacaaccgttacgttcgccgtcatccactcaccgagctctttgtgaagaacataggcattttcggttccgtccatactcataatatcagcccatttttcttcttctttcttaacgtgagcgtcgaataaagatgaagacatgtcttccgctgaagattctaagccgtttacatatttcaccgcattcggaccggccaccatgcctccgtaaatcgcagacagcagggagttcgctcccaagcggttgccgccgtgcatagaataatcacattccccagccgcaaacagtccagggatgtttgtcatttgatcgtaatctacccataaaccgcccatagaataatggaccgccgggaagattttcattgggagcttacgcgggtcgtctcccatgaatttctcataaatctcaatgatgccgccaagcttaatatcaagctctttcggatctttatgagacagatcgagatataccatgttttcaccgttaatgccgagcttctggttcacacacacatcaaatatttcgcgtgtcgcaatatcacgcggcaccaggtttccgtatgccggatatttttcctccaggaaataccatggtttgccgtctttatatgtccacacgcgcccgccttcaccacgcgctgattcactcatcagtcttaatttgtcatcgcccggtatggctgtcgggtggatttgaatgaattctccgtttgcataatacgctccctgctgataaacgattgatgcagcagatcctgtattaatcatggagttcgttgattttccaaagatgattcccggtccgcccgtcgccataatgacagcgtctgaacggaaggattcaatttgcatgtttgtcaggttttgtgcaacaattccacggcaggttctgtcatcatctaaaacagcgccaaggaattcccagccttcgtattttgtgaccagacccgcaacttcgtatctgcgcacttgctcgtccagtgcgtaaagcagctgctgtcccgtcgtcgcaccagcataagcagttctgtggtgctgtgtacccccgaatcggcggaaatcaagcaggccttcaggcgtccggttaaacatgacgcccatccggtctaataagtggatgattgaaggcgccgcttcacacatcgccttgaccggcggctggttggcaagaaagtctcccccgtataccgtgtcatcaaaatgttcccacggagagtcaccttccccttttgtattgaccgctccgtttatgccgccttgcgcacaaaccgaatgagaacgtttgacaggaacgatggaaaacaacttaaccgccattcctgattccgctgctttaattgtcgccatgaggccggcaagacccccgccgactacgataatgcttgattgactcatgatagcccctctccctctagtaatctagtactcttaaacaaatgcgaaaatcgcttttaagcctacgtatgacagtgcaacaaaaataatcagcgtaacgtatgtcgaaattctttgagaacgaggcgttaccgtgatgccccatgtaacagcgaaagaccataaaccgttcgagaagtggaaaattgttgataaaacaccgacaatgtaaaaaccaagcatagccggagagctcaaaatattcgccatcatgtcgaaattgacctcagcgcccatttgtgcggcaatgcgggtttcccacacgtgccagctgacgaaaatgagggtgatgataccggttacacgctgcaggacgaatagccagtttctcatgtagctgtattgacctgcgttatttttcgcagtaaacgctatgtacacaccataaactgcatgataaattaatggtaagaagataataaaaatttccaaggcatacctgaaaggcagactatccataaaatgagcagcgctattgaatgcttcagcgccccttgcggcaaactggttgacgactaaatgctgaataagaaagatgccgaccggtatgacgccaagcaaggaatgcaatcttcgaaaataaaactctctgttcccagacattactttaccccctgtttgataagtgcgaaatgtgctaaatctcttcccccacttctttcaattgtaagcactttattaagatttattgacaatttcattttactcctccctcaaaagggcgtcaagaaaacgcgtacataaattataattttccgaattggttagttgattgaaaaattttattttatcaatatatatttcttacttaatttttcataagaattacaggatcattctgtaatcctcccccctgtttgagctataatatacgcaggagagaggggagacagatatgaagtctaaatttgaagcatctattgacaacctaaaagaaattgaaatgaacgcctatgcctacgaactaatacgagagatcgttctcccagatatgcttggccaagattactcttccatgatgtattgggcaggaaaacatctcgcccgtaagtttcctcttgaatcatgggaggaatttccggccttctttgaagaagcgggctggggaaccctcaccaacgtaagcgctaaaaaacaggagcttgaatttgaacttgaagggccgatcatttccaaccggcttaaacatcagaaagaaccttgctttcagctggaggctggttttatcgctgaacaaattcaattgatgaatgatcagattgccgaatcatatgaacaagtgaaaaagagagcggataaagtggttctgactgtgaaatgggatatgaaagacccagtgtaatcaaaaaggcggtgactgcatagtcccgcctttttgattgtcattacacagctgaagggtgttttgaaagctcaaatgcatcgtgaagcgactcgactgctttcaccatgtcattttcgcttacgactgttgacactttgatttcagatgtgctgaccattttgattaaaatgtttttttgcgccagtacagcaaacatttcagccgctacaccgggatttgagaccatgccggatccaacaatggatactttagccaatttgctttctgtctcgattttctcaaattccagcgcgtctttatactcttcaagcaccgcaacggtttggtctgcatcttctgttttgacagagaaggaaattccagtcttgtcctcggcctgcgtttggataatgatatccacgtttatgtttcttttggcaagtgtcgtaaaaatagtagacaaagttgtcaagccgctagtcagcccgtaaatggttactcttgtgatttgatcttcaaatgcaatgcctctgacaattaaattctgttccatggatgattcctcctcaattaatgttcccgcttcggtttctgtacttgaacgcacttctaacggcacttggtaatttttcgcgaactcaactgctctcggatgaagaacgccggcgcctaaattggcaagctcaagcatttcatcgtatgagatgcccgcaagttttctcgctgatttcacatagcgcggatcggttgtaaacacacctggcacgtctgtgtatatgtcacatttatcagcttttaaagcggcagccaaagcaactgctgttgtatctgaaccgccccggcccaatgtcgtaatttcacaatcctctgtcattccttggaagcctgcaacaatgacaatttttcctttttcaagctggtctgctaaaaccgaagtgtcgatatctgtaattctggcgtttccgtgaatggcctccgtacggattcccgcctgccagccagtataagacacagcgtcatagcctttttcctgcaatgccattgaaaggagtgaaatcgtgacctgctcgcctgtcgccagcagcatatccatttcgcgtttgctcggctggtcagaaatagcttttgcaaggctgaccaattcgtcagtggattttcccattgctgaaacgacgacaacgacttgatggcctttctgtttttctgcaattgcgcggtttgccgcattttgaattttttcgactgagccgacggaagtgcctccgaatttttgtacaataagacccatgtattaccaccctttacattttggttcgtgcgggtgaggagaaagagcgctttgtccacaataaaaaaagcaatgagaggaatactctcattgcttatcaattaatcatcataaatgattatgaacaacgagatagccctccaagaaaatgatttcttgacagccttacatttattcaatgcacggccagcaaataataccgatggggttttatttgcttcggcgacgctcccctttcagcctttttcacagaatccatctttctccaaaggcatactcttgaagttcgcacctctatcttcaccatataacacgatctaactatgaaattagttcacattttatcagatcttatttaaaaggacaacattatttttgcaatttgtcgtaaaggagctgagccgccgctgcgggaacaccggcttttttgatgtcctcaaggcttgcttccttcatttttttaacggaaccgaaatgctttaacagcattttctttcttttctctccgatacccgggatgtcgtccaaaacggattgaaacgcgctttttccgcggatttgcctgtgaaaactgattgcaaaacggtgcacctcgtcctgaatgcgctgcaggaggtaaaattcctggctgtttcgttccagatacaccacctccagcggatcaccgatcagtaaatttgaggttctgtgtttttcatctttcgctaaaccggcgatcgggatatccaagccgagttcattttcaatgacatcccttgctgcgttgatctgcccttttcctccgtcaatgataatcagatcgggcagcggcagattctcacgaagcactctcgtatagcgtcttctgacaacctctctcatagaaccgtaatcatccggccctgtaacagttttgattttatatttgcggtattcctttttgtatggtttgccatcgataaacacaatcatcgcggaaaccgggtttgtcccctgtatatttgagttatcaaacgcttcaattctgtgcggcgtataaatatttaatgcctcacctagtttctgcactgccccgattgaacgctcctcgtcccgttcgattaaagagaatttttctttcaatgcgattttcgcatttttatgggcaagcatgagcagttcttttttcgggccttttttcggctggtgaacgtttgtttccagcagctgctcgatcatagattgatctacgctgtccggaactaaaatctccttcggaaggaagtggttgttttttgaatagaactgcccgatgaacgtgaggaactcttcatctgcttcctgataaagcgggaacatgctgacatcgcgttcaatgagctttccttggcggatgaaaaagacctgcacgcacatccagcccttatcgtacgcgtacgcgaacacatcacggtcgactagatcgttcatcgtcattttttgtttttccatcgttgattcaatatgggccatttggtcacgaagctcttttgctcgttcaaactcaagattctcagcagcttcatgcattttctcttcaagctcttttttgacctcattatagccgccccttaagaaacgtgtaatgctttcaaccagctctctgttcgtctcttcggaaatatcctttacacacggagcgaggcattggcccagatgatagtaaaggcacactctgtccgggagcttggagcattttctgagaggatacagacggtcgagcagtttttttgtttcccttgctgcctgtacattcggatacggcccgaaatagcgccctttgtcttttttgacattgcgggtgacaatcagccttgggtggcgttcatgggtgagttttatgaaaggataggttttgtcgtctttgagcatgacgttgtatttcggatcatgctttttgatcagattcatttctaaaataagcgcttcaagattggaggacgtcacgatatattcaaaatcctcgatttccgtcacaagcctttgggttttcgcgtcgtgagaaccggtgaagtaggagcgcactctgtttttcagcacttttgctttccctacgtagatcacagtctgctgccggtccttcatgagataacaacccggttgatcaggaaggagggcgagtttttctttcagttgtttgttcatatgttacccttccttatgtttaatcctttatttccagtttaacacgaacgtttgtttttctctatggttcacaattggcgaataaaaaaagcgatccctcaatcggaatcgctctggcatgtaagcagcggaaaattaaagatgtttgtttacaagctcttgaagcgcttcttttggtttgaagccgactgaagtttcaactacttcgccgtcttttaacacaagaagagtcgggatgctcataacgccgtattttccggcagtttcttggttttcgtctacatcgatttttacgattttcagtttgtctcccatttcttgatccaattcttcaagaacaggtgcaatcattttacaaggtccgcaccaaggagcccagaagtctgccagtacgacgccttcgcttgtttcagctgagaaagattgatcagttgcttttacgatagccattattgaattcctccaatgtgaaatgatgatttttagtatagcatctcccattcgttcacgctattttaatgcttacaaattattttttcctgatcacagccggtttactcatttttatatggttgaatgggatatgctctttttttaaaacacaaatctgataatggccccaatcactacaattgccccaataatcattaaaatggtacgaagcataagatcacatctcctcttcactgtcatgtactttaccatgccctgccggagctgttttaaaacctgaaaaagagcgccggcatgaagctccggcgctcttgcgcgattaagaatcagcacgcagcgtaagcaagacgactgacattggcgggagttttactttcagtttgtttttgctgagcgtgtattgcctgaaggattccggtttgacatgatgaggatcgtcaaacgtgttatgcgcattcattttttctgccgtaagaatgactccggaatggtccgctgccttgtgtaggcccctcagctcgatttccgcctccgctttgttttggtgatcgatgttgcaaattgtgatattgatatcgccttcagtttgtttcgacgctgaaatgctgatttgcggaagcgtttcaccgttccattcatagtcggcagacattgtctctgtggctaaaagagaagcgtcctggtgcaccttaaacatattgaatacatggtacgtcggtgtcaaaagcatccgctctccctcagtcaaaatcatcgcttgaagaacatttactgtttgggcgatgttggccatttgcacccggcggcaatgctgatggaaaatgtggaaatgagaagccgccaccagtgcatcacgaatggtgttttgctgatataagaaaccgggattcgtgcctggctcgggatcaaaccacgtgccccattcatcaataatcagcccgacccgctgctccggatcgtaccggtccataatcgtgccgtgtttttgaatcaattcatcgatgtatttggcttttttcatcgtaataaaccattcatcttccgtgaattctgtggctgatcctttgcccttccagaaatcccccggaatcgtgtaataatgaagactcaacccgtccatcaggccagcggcttttttcataagcacgtccgtccaattaaaatcatccacatttgcgccgcctgcaattttataaatgtcattcccgctgtaattgcggacataagtctgaaaacgccggtacagatctgcgtagtattcgggatgcatgttgccgccgcagccccagttttcattgcccacgccgaaatatttcagcttccaaggctcttctcttccattttgctttctccagtctgacatcggcgtgccttcttcaaatgtcatatactcaatccactccgccatttcctgaacggttccgcttccgacattgccgcaaatatatggctcgcattcaagcagctcgcaaagcatcataaattcatgcgttccgaattcatttgattcaattgtaccgccccagtgagtgttcagcattgtcttacggtcaccgacaccgtttgcccaatggtattcgtccgcaaaacacccgcctggccacctgaggacagggatgtgcagctgtttgagcgcctccagcacgtcctttcgtatcccgttgatattggggatgtctgagtccgttccgacccagatcccctcataaatccctcttcctaaatgctcagcaaaatgaccgtatatatttttgttaattgttccttttacgatatctgtttgaatcactgcttgatgttcagacatgcctctgatcattcctttcatacggatatgaaaagcaccacagtcaaatatgtgatctgtcttttgcctgaggagtcagcatgaatgtaagcgcttttaaagtaaccatattatatatgttcgtacatgtcaacgacattttctattgtttttatatttgtacgtatgtatttataaatatgaaaaaatcccgaacttttaaagtccgggatttcctttatgagtgtatattcaattgtttgaattcctcagttaataacgggacaacttcaaataaatcaccgacgatgccgtaatccgctattttaaagatatcggcttcggggtctttattgatggcgacgatcaccttgctgtttgacatgccggccaaatgctggatggcgccggaaatgccgcatgcaatgtacaaatccggagtgacgactttcccggtctgcccgatttggagagcgtaatcgcaataatcagcgtcacatgccccgcgagaagccccgactgcggcccctagcacctctgcaagctcctgcagaggctgaaatccctccttgcttttgactcctcggccgcccgcaacgataatttttgcttcggagagatcaacgccgtcagctgtttttttcacgacctcttggataacagtgcggaggtcagtaagagaaacatcaatgcttttgatgctccccgatctgctggtgtctttttctgaagcttgaatgttattggggcgaattgttgcaaagatcatcggatcggttgaaatgacgcgttcaaaagctttccccgagtaaatcggccgtgtgaacacaacattccctccggtaacgcttacatctatagcatcagaaattaagcctgtttgcagccgggcagcaagcttcggtgaaagatccttgcccattgccgtatgcccgaagatgactgaatcaggattttcttgctcgataacacctctcatgacctggctgtacccgtctgccgtgtatgttttcagcttcgggtcctcagcggtaagaactttatctgctccgtaatgaataagctcttgtgcaatgctttgtacattttcaccgatgagaacaccgatgacttccccatctcctgaaatggttcttcctgcagctattgcttcaaaggtgacattccgcaattccccatcgcgtatttctccaagcacgatcactttttttcccattctaacatccccctgtttctttgaatgtccaagctttaaatgactttagcttcgctgcggagcaatgaaacaagctcttttgcctgttcagcaggctcaccttggagaagcttcccggcttcttttttcggcggcagaaaacgttcaatggttttcagctttggttcagcatcctcttcgtccaggtcaagatcatcaagttcaagctcttcaagcggctttttcttagccttcataattcccggaagcgatggatagcgcggctcgtttaagccctgctgagctgtgacaagcaatgggagcgtcgttttgattttttcaacatccccttcgacgtccctttctgcttctgcatcagtgccgttgatttcgagtttggtgatcgtagtgatacacggaatgtccagcagctcggcaagccgaggcgccacttgtcctgatcctccgtcaatggcaacatttccgccgagaatcaaatcaaactcctgatccttcatatagtggtataaaacttgagaaatggaatattggtcgggttcatcaagatcatcttctatgttgattaaaacagcttggtcacaacccatggcaagcgccgtacgcaattctttctccgcttcttcaccgccgaccgtgacagcggtgatcgtgccgccatgcttttccttcagctggatggcttcttctatcgcgtactcatcatatggattaatgatccattccgctccgtcatcctgaatctttcctgtttcaatgacgattttttcttctgtgtcaaacgtccgtttcatcagtacaaatagattcatgatcatatccccttttattcgcctttgaactgaggctttcttttttcgagaaatgcctggatgccttccttggcgtcctctgactcaaatgcttccccaaatcgctttgcttcaagctttaagctgccttcataggaatacaccttgttggaataaagaagttcaagcaaagatgccagcgtttgcgggcttttctctgcaaacttagcggcaagtgcttttgctttttcaatcacttctgcctcatctttcgctccaattgaaacaagtccgagatcaagcgcttcttttccggatatcggttctcctgatccgatgagctccagtgctttggctgtaccgacatatctcggaaggcgctgtgtccccgcaaaacctggaatgataccgagattaagctccgggagccccagcttagcatcttctgccgcgattctgatgtgacaggccattgcaagctccagcccgcctccgagagcagcgccgtgaatcgctgcgataatcggttttggaaaactttcgattctctccattaactgctggccgcgctcagcgagcaatgaggaatcctcattgcctttaagcgatgtaaattctttaatatcagcgccggctgagaaaaatcttccctcgccgtgaatgataatgcttcgtacgcctgcatctgtctcacattgatcaagacaggaagacagctcttctaatatccggcttgaaagcgcgtttgccggcggattgtgaatcgtcaagactgccacaaattgatcaaccgcaagtgaaattgcattcataggacagaactcctttacttattgtgaattccggataccaataattctaaaacgctgtttgaaagcgcaacgagatcgtacttttggtcattcatcacccaagttgtcacagtttcgtcaatcgttccaaaaatcatctgccgggcgaggcggacatcgaggccttcttttatttcgcctgattgtataccttccgtcaaaatgccatccaaaatatttaagtagccttttaatatttcgttgattttttggcgcagctccaagttggattggcggagctcaagctgcgtgacaatcgcgagattatggtcacccgctaaaagggaaaaatgctttgaaatcacaagcgccaatttctctttcgctgttgctttttctttaatgtcctcttccatccgctcaataaattgacccattttttctttgaaaagagaaattaaaatatcttctttgtttttaaaatagagatagatggtgccgtccgctactccggcttgtttggcaattttggatacctgtgactggtggtagccgttttctgcaatgacttctactgctgcatcaataatctgcatatactttggccgtttttgcttcaatgttcatcgttccttcctacagaaatgaatgactattcattcataatttcatgataagaaggattttcaggtttgtcaagtttattcataggcgttctctttttttatttgatatgatgattttcggtttcttcttcaagtaaacgccttcttaaaatttttcccaccgccgttttcggcagctcttttctgaactcataggctttgggcaccttatagggagctagtcgagatctcgcaaaggcatccagttcttctgcatcggcttttgcgcctttctttaatacgacaaatgcttttactgtttctcccctgtaggaatcgggaacgcctgcaacaacaatttcctggatggcttcatgttcataaagcgcttcttctacctcacgcgggtaaatattgtaaccgccggcaatgatgatatccttcttcctgtcagcaatatagaaaaagccttcttcatccatatagcccatgtccccggtgaacagccaaccatctctcagcactgcggcggtttcctctggtttattccagtatcctttcatgacttgcggaccttttacaatgatttctccatgctcatacggagcggcaagctcacccgtctcttcagaatagatcgcagcgtccgtactcggccaaggacagccgatactgcccggcttgttttttccccagataaagttggcgtgcgtcactggggatgcctcagacaaaccatagccttccacaagctttccgccagtcaccttttcaaatttctgctttacctccacggggagcgcggctgatccgctaagacagcttttaatggatgacagatcataatgctgcaattcggggtgatgcaaaaggccaatgtaaattgtcggtgcgccaggaaagagcgtcggtttgtgtttgtcgatgattttcagtgtttcgagcggatcaaacttaggaagaagaatcatttcgaagcctagtttaatcgaatagttcatgactgccgtcagtccgtagacatgaaaaaatggaacgatgcccagcactttttcagcgccttctttcacgtcatacatccaagcggcgcacatttcagtatttgccaaaatattttggtgcgtgagcatgaccccttttggagctccggttgttcctccggtatactggaggacagcgatatcatgctcaggatcgatcttcgggattgtcaggagttcagttttttcctgcttcatactggaagcgaacgtgtgaatgttagctgttttgtcaaagtcgatatgcactttttgtttttgcgtcagcgggtaaagaatattcttcggaaaaggcaaatagtcttttacgctggttatcaaaatctggtcaactattgatagcgttttcatttttattgccttcgggaaaagcaaatctaaggtgatgattacacttacctgagcatctctaagctggtattcaagctcatgctcggtataaagcggattcgtctgcaccacgatgccaccggcaaacaagacgccataataagaaatcactgtttgcgggcaattgggcagcataacagccactctgtctcctttttgcaggccattgcactgcaaaaaagctgcaagtttaagagcatccgtcagaatgtcatgaaaggtgagtttttttccataaaacgatattgcggttttatcagggaatcgtgcggcggagtctgtcaggatggattgcagggttttattcggcaacgggagctcatgcgggatatcgttgggatactcggcaagccacggcttttgagactgcataaaacctccccctttcgattttagagttccaccttatcattatagcagatggacggcaaaaaaaagaaaaagaaaggtaaatctttctttttctcataatatgaacagatatataagaccaattaacaaaaagattcccgccgcggcgagcagtacttttgcaagcttttccatttattctccgtccccttatattccggctgccaccacaaatgaaagcccgacagaaatgacaaatgaaataaagccgacagcccggttatcattttcgatttcctgatcaattttaaaccgcggagtcaaaaactcaaaaataaagtagctgatcagaagcataacaaacccgtaaacgccccagccgatcatttgcagcagcgaattatgctgggagatggaatgctgaaatacgtttgcgatccccaaaatttttccgccggtcgccattgccaccgcaagatttcctttttgaatctcttcccagtttttataagccgtcaccagctcaaacacagtcaaaaagaggacgaggcagagaaccgcgacactgtaatatgccgcgatttccacaagctcgttttcccaaaaatcactcatggccatactcccttttattttagttcaacaaccgtaacgcctgatcctccctcacctgcttcaccgaaacgggaacttttgacgctgcggtggtttttcagaagatcctgtacgccttttcttaaagcgccggttccttttccgtggatgattgacactcttggatatccggctaacaccgcatcatccaagtatttttcaacccggcttagggcattttcatagcgttcgccgcggagatcaagttcaagcgatacgtgatagtcctttcccttgaccgctgtaatgattttttctttttttggctccggagctgatttgataaactccagatctttttcttttactttcatctttaaaataccgatttggacattccattcattgccgcctgttttttcgagcaatgttcctttttgcccgaaagtgaggactttcacctcgtcgccaggcttaaagtcgcgtttttgcgctttcggcttctccggtttcttggacttttcaaaagccggcatagcgccttctaaccgtttcttcgcgttaatcagctcgtgatccttgaaggatttgtgttcttcttttatggagcgcaattcatgaataatgtcctcggcttctttcattgccgcttttactttttcagcagcctgctgttctgcctcttcaagcattttgtcttttttgctgttaagctcgatgatttgctgctgcagctctttatgcagtttttccgcttcttttctgattgattctgtctcagaaagctcttcttccgcacgttttttgctttgttccagcgacgcaatcatcgtatcgacttcgttatgctcggccgtcatttctgacttcgcctgcccgatgatatggtccggaagcccgaggcgttttgaaatttcgaaagcattgcttcgacccggcacaccaattaaaagtttataggtcggtgacagcgtttcgatgtcaaattcaacgctggcattcatgacgccttctctgttatagccgtacgccttcaattccggataatgcgtcgtagctaacactcgtgcattggtgcgatgcacgtcatccaagatgctcatggcgagggccgccccctcctgcggatctgtccctgcaccaagttcatcgaaaagcacaaggctgttttcattgacctgttctaaaatgccgacaatattcaccatatgggatgagaacgtacttaaactttgctcaatcgactgttcatcaccgatatcagcgaatacgtgctcaaatactgccgcttctgacccttcatctgccgggatatgaagacctgactgcgccattaaggttagcaggcctaacgttttaagggtgactgttttccccccggtgtttggccctgtgatgacaatggttgaaaaatcgcggccaagctcgatgtcattggcaacaacttgatcaggcggaagcaatggatggcgggcttttttcaaacggataaagccggtgtcgttcataatcggttttgtcgctttaaccgcttttgcatatctagcttttgcaaaaataaagtcaagcgtctgcagcacttgcaaatctagaaatagttcctctgtatactctgccgttttctctgtcagcacacgcaaaatccgttcaatttcttgcttttctttcactttcgcctgctgaagggaattgttcatatctacaatcgcctgcggttcaatgaatagtgtcgcaccagaggatgaggtgtcgtgcacaattcctccatagctggatctgtactcctgtttgaccgggatcacaaagcggtcattccgaatcgtaacaatcgtatcagacagcattttcgatgcggaagaggaacgcagcatcgactctaaccggtctctgactcttgattcgagtgttctgagctgtgtgcggattcctcttaatgtttccgatgcatgatcaagcacttctccgtgatcatcaatgcaggaattaatgtcccgctctaaatcggacagcgtgataagctgttcagcatgctgatggatcagcggaatgtcgacaccgtcttcagccatttgggtgataaaatgtttcatttgtttaactgcataaagcaggcctgagatttcagtgaattcagaaggactgagaacactgccgatttccgcccgtcttaacgctcctctgatatctacaaggccgccaaatggcgcttggcctctcagccggataatgtcagaagcttcgtctacttcatccagctgttttttgatttcgtctatagaagcagaaggcttaagctcgagaagcatttcttttccgagcgatgaagcggcatgcccaataacctgttctttcactttatgaaattcaagagctgataatactttttgctgcacgattgtgtgagcctccttacttaatcgttgcgcttcagaaatgcctctacgtctttaagcgaccgggcattcagaacgtttttcgtttccgtccatcctttgcgcgcggcagtaacgccagttttcatatcgtctaacatctcaatattatgggcatcagtattaatcaccaatgtaaccccttgttcgtttgctttcattaaatgctctgtgcgcagatcaaggcgcgcagggttggcgttgagttcaagcgccgtatttgttttcctcgcaagctcaatcagctgatcaatatcgatttcgtaaccggcccgtctgccgataaggcgcccggtcggatgtgcgataatgtcaacatgcttgtttgtcagtgccgtctcaagccgtttcataatcacgtgttccggctgattaaaactggaatgaatcgatgcaataacgatatccatttccgcaagcacatcgtcatcataatcgagcgtaccgtcaggcaggatatccatctcaacgcctttcaaaatacggaagttttcaaactctgcattcagcgcgtcaatttcttttgcctgctgcttaagtctttctgcagtaagcccgttggcgacctttaaatattgtgagtgatcggtgatcgccatgtattgatagccttttttgatgcaggcttcagccatctctctgatcgaaaatgcgccatcgctccacgttgagtgcatgtggagatcacctttgatttgcccgagctctatcagttcaatgctgtcgctgtaggtttccacttcctgtccgctttcacgaatttccggcggaatcagcggcaggccgaagtgcgcataaaattcacgttcactcggaaatgttttgatctctccggtttcaactgtctcaacgccgtattcactgatccgctcgccgcgttctttggcgatttggcgcatcttaatattgtgatcctttgatcccgtaaaatgatggagtgttgtcggaaactgctcttccgtcacaagacggaaatcgacgcttgtttcatattcaaaggaaaggatgacggacaccttcgtatctccgcttgcgattacgcttttgatgtttggcagctcaagaagctgctctcttacttcagccggatgatctgtagcaatgatataatccagatccttcaccgtttcccgcgctctgcggagacttccggcacgagaaaatttgatgatatgcgtaaattgagaaagatgctcctcaatttcccgcgcgatccggagggcgtatccgatcgggaaccgttcaggctgttttccggcttccccgagcgcctgtaatattttttcttccgattttttgccgaagcccgcaagaccctggaccttttgctgctcacaggcttccttcagagattctgcatcgtgtacgccgagctctttatacagctttgcgatttttttgccgccgagccccggcagcttcaataaaggcacgagtccttccggcacttctttctgaagcgattcgagcgtgcttgactttccttcatctatatactctttaatgacgctgtacgttccttttccaatgccggacagcgacatcatatcgtccatttctgataagcttcggtcgtcctgttccaaggctgccgccgcttttcggaaggcagatactttaaacgggttgtcccccttgagttccatatagactgcaatggtttcaagcagccggataatatcttttttatgcatatcataaccccagacgttcacatatgtttccatcatacttgaaaaaaacttctccggacaagagaagtttttttatgccccgtactgtgtccacagctcttgtaaaagccctgacaagtacggtgtatggttaatgatcacatttgcgagagacgattgtcccatcatttgctgcaacgcatctaccggcagaacggatgcgacatacagcagcacaaatgtaaataaatagacttctagaaaaccgagaacggctcccagcatctggttgatttgtttaatcaccggaatgccggctacaatactcaggaacgagccgatgattctcagtaagattttagcaatgataaataaaacgataaacgcaatcgcattatagtacgctgcttccaaattccccgtaaaaaaagaaagagccggctgtcccgctgaaaaatcgggtgcgggaatccaatgtaaatgcggtgccacgtttttatagaataaagccgcaaaggcaattgataaaataaagctcgtcaagcggataaactgcaggataaaaccgcgttttaaccccagtaaagtccccatcaggagcaagattaagatgatgatatcaagcatagttgttcaatccttttctttaagctgacgctccagtttttcacatttctcttgtaatttgacataatcgtgcaccacatttaccgctgtcagcactgcaagtttatttatatcaaggtatggatttttttcattgatttctctcattttatcatcaacaattccggcgacatacctcatatgggctctgctttcttcaccgacaatcgtgaagtgctggccgtaaatgtcaacggttgtttttgtttttttgccgtcagacaacgtttctcctccattccgcgagaatcctagttcttatcataacacgtttattaaatgaatggaaagacgagcctcccgctgttatgatacactggtatatacagcgaaaagtgtaaaaaaaggagattattacgtgtcccattcagtgataaaagtatcgttgtctgctattgaccaaatgaaaatgacgtacagcggttcacttacagcctctgttccgcagggagccgtttttcaggcaaaaccgcccggctgtaccattacagcatataaatcaggcaaggtcttgtttcaaggaaaaaacgctgcggcagaatccgcgcgctggggaacagcagagcctcaggaaaagaagaaaacggccaaaaagccggctgatccccgctatgcccctccggcagatatcgccggaatgtctgttatcggttctgacgaagtcggaaccggagattactttggcccaatgacggttgtatgcgcgtacgtcgacaaaaccatgcttcctttaatgaaggaactcggtgttaaggattctaaagatttaaaagatccgcaaatcatcgagattgcccgaaacctgatcaaaactattccatatagcctgctggttttaaaaaatgaaaagtataacagcatgcaggaaaaaggcatgagccaagggaaaatgaaagctttgctgcacaatcaggcgatcacacatttattaagaaaattggatggagtaaagcctgaagccattttgattgaccaattcgctgagccaggcgtctacttcaatcatttaaagggcagagacattgtgaaggagcggacctattttagcacaaaagctgaaggtattcacctggctgtcgctgctgcttcaatcattgcaagatattcatttttaatggaaatggataaactatcacgcgcggcaggaatgacgcttccaaaaggggccggtccgcacgtcgatgaagcggccgccaagctgatcctcaaaaaaggggcatctgcactcagaacctttacaaaactccatttcgccaatacgcaaaaagcgcagcgccttgctgataaaaaacgttcatagaaaaaagcttgcagatttctctgcaagcttttttctcagcctcttaaaacagcttgatatgtgtcttctaacgctttcagcactttgctgtgcgcctttgtcacttcttcttcagtcagtgtttgttcagggttgacatactggagtgagaaagcgactgacttcttgccttcctccatatgttcgccttcgtatacgtcaaagacggttacctctttcagaagcttgccgccagcctctttaatgacgctctcgagctgtccgcttgtaacggttttatctgttacaagggcgatatcacgtgtcacagacggatatttcggaatcgccgtgtaaacaagcggtgctgtttctgctgcgagcaacgcatgaagatcgagctcaaatacgtatgtttcctttatatccagttctttttccaatgaagggtggacttggccgatgaagccgatcagagaaccattcaataaaatgttcgctgttctgcccggatgcagctgtttgcgttcagactgtacaaattcaatgctgtctaggacgttgagtttgtctaacagcccttccacaattcctttgacaacaaagaaatcaactggtttcttttcaccctgccatagctgcttgcgccataatccggtaacagctcctgctacgcgttctgtttcaacaggttttgtgtcctcttccttcgttaggaaaacggagccaacttcgtacagtgcaactgagtcagtctgcctcgcaaggttgtaagaaacagaatcaagcagattcggaacaagactgtgtctgagaatgcttctttcttcactcattggaagcgcaagcacagtattcagtgatttttcaatcgcaaacgctgccgctttcttctcgtttgtcagtgagtaagtgatggcctgtgataagcctgcgccttcaaggaagcgtctgactttacggcgttttgcctgatatggcgttaatccgcctgtagttcccgctgtctcaggaagcgtagacggaatgttatcgtagccgtacagtcttgccgcttcttcaattaaatcctcttctattgtaatgtcgccgcggcgtgatgggacagtcacaacgagaagttcatccgcttcaccgaccgtaaaaccgagacgtttataaatgctgatcagttcttctttactgatcgtcaggcctagaacgctgctcactttgtcagcagatacgtgaatgttatttgcttcgattgtcaggtgatcttcctcaactgttccagcaagcacctcaccgccggcatacagatggatcatctgcgcagcccgttctgctgcaagacgtacgcgcgccggatcaattcctttttcaaatcttacgcttgattcacttctcaaaccaaggtctttggaagccttgcgaaccgtctgcccattgaaatacgcagcctcaagcaaaatcgttttcgtatcttcctgaacctctgactctgctcctcccatgacacccgcaacggcctgcgctttcgttccgtttgtaatgacaaggtgatcggcggacagcttacgttcttgatcatcaagagttacgatcatttcattctcagctgcttttcttactacgacttccttagagccaaatctgtcataatcaaacgcatgaagcggctgtccgtattccaacaggacaaaatttgtgatgtcaacgacgttgttgtgcggacgaatgcctgcattcatcagctttgtctgcatccaaagcggtgacggagcaatcgtgacatttttaatgatttttgcagtgtacagcgggttcgcttcttgatcttcaattttgactgaaatgtaatcagacgcttgttctgaagcagccgggtaatccgtttgcggaagctttacctcagtgtctaaaatcgcggcaacctcgtaagcaacaccaagcatgttcatggcatccgcgcggtttggcgttaaacccagctcaagaatcgcatcgtcaagctgtaaagccgctaaggcatcgcttcctgtttcagcgtcattagggaatacgaaaatgccttctgcatactccttcgccacaagtttgctttcgataccaagctcctgtaaggaacagatcatgccatttgattcttcaccgcgaagcttggcttttttgattttgaaattgcccggcagcaccgctccgactgttgcaactgcgactttttgtcccttatccacattcggcgcgccgcaaatgatttgtacaggggcttcagctccgatatccacaaggcacttattcagcttatcagcattcgggtgctgctcgcgctccagcacatggccgatgacaacacctttgatgccttctcctttgtattcaattccttcaacctcaataccggctcttgtaattttttcagcaagaacagccgggtccatgccttttaaatcaacataatcctctaaccatttataagaaacaaacatccttgcatcctcctcttacgcctgtttaaactgcgaaataaatctgacatcgtttgtatagaagtggcggatatcatcaatgccgtatttcagcatcgcgatgcgctcaacacccattccgaatgcgaagccctgatattccttcggatcaaagccagccattttaagcacgttcgggtgaaccattccggcaccgaggatttcaatccagcctgttcctttacatactgagcagccgttcccaccacatttaaagcatgtcacatccacttctactgaaggctcagtaaacgggaagaagcttgggcggagtctgatttcgcggtcttgtccgaacatttttttcgcaacaagttcaagcgttccttttaaatcactcatgctgatgtttttgtcaacgacaagcccttcaatttgcataaattggtgagagtgcgtcgcatcatcgttatcacggcgatatactttacccgggcaaatgattttaacgggacctttgccttcatgcttttccatcgtccgtgtttggacaggggaagtttgcgttctcatcaaagtctcctctgtgatgtaaaagctgtcctgcatatcgcgcgcagggtgttctttcggaagattgagcgattcgaagttgtaataatccgtttcaacctctggcccttcctcgactgtgtagcccataccgataaataaatcttcaatttcttcaatgacaacagtgagcggatggcggccgccgactgcaacagggttccccggcagcgtgacgtcaattgtctgtcctgcaagcttctgtttcatttcctcttcttcaagcttctcgtttttgtcagcaatcgcattggcaatacgctcccttacttcgttcgcgagcgcccccatttttggacgttcctcagcagaaagcttgcccattccgcgcagcacttctgtaatcggccctttttttccgagatattgcacccgaatatcattgacaatcttcaatgagcttgccgcttctacttgttctaaagcttcttgttccagctgttttagcttttcttccattttgcatcctccttttatgtaaacaaaccgtcatatgtctttggaaaataaaaaaaacccgtcccttttacaagggacgagttgtggccgcggtaccacccttatttcagacagactgatgctgtcgtcagcttcattgacataacggaatcagattccggttcacctttacgcgcagtgtacgcggtcccggcgacaactcaagaggtgaagccaatttccggctgcgttaaaaatgctctcagtcagcggcattttctccctggaaagcagttgatcagaaattgaggtcctctgtcacggtttttgaaatattatgttctattatagagaaatccaacgcttggcgcaacactatcctcgcaagtgatacacgaggatggcagccgcaaccgcaacgtttagtgattcagcctgtccgtaaagcggcacgtacaggttcaaatccgttttttccagcaatgcagcatccacccctgcaccttcatttcctacaatgagcgcaaaggattcagactgaggaatctcctggtaaggcgctccgttttgcagcgccgtgccgtatacttttacgccctctgccttcaattcgtccacatatgaaggcaggtttcttctcacaacaggaatatggaagtgagatccttgagcagatcgcagtgtttttccgttaaaggcgtccgccgtgccgtcaccgagtacaaccgcatccaaaccggccgcatcagccgttcgaatcattgtgccaaggtttcccggatcttgaacagcgtcaatcagcagcaccttgcgtgccgttgccagcttttcttcaggcatatggcacacagcggcaatctgctgcggcgtttcggtttcagtcacagctgaaaacgcatcttcactcagcatatagcactggataccagtctcaagatctgaaggaatcttcgtttcatcctttacaaggatttctttcacaatgcccgggcttttcaacgcctcttcaacgaggtgttctccctctatcagaaatgtatttgtttttgttcgttctttttttgtgtgaagctttttccaatccttcactttttggttttttgccgattctatttgtttcactgtctatgtggcgctcctttttttaacatgatgttattatatcgcaagaacagcacataataaaccaggtgcagggttagaatatacgtattacattttagaaaaaggagcgttttacatggatcttaatttacgtcatgccgtcatctccaatgtcaccggcaataatcaggagcagcttgagcatacaatcgtagatgcgattcaaagcggtgaagaaaaaatgcttccagggctcggcgttttattcgaagtcatttggcagcacgcatccgaaagtgagaaaaacgaaatgctgaaaacgcttgaaggcggattaaaacccgccgaataagacatgaaaccgggtgacagcgcccggtttttttcttatataataaaaacatgatgagggggaacgccatgtttttacagccgttattagcgaaaaaaattattgctgaagtaaaaaaaatgtacgaacgtgaagtcattattgtaaacacggacggtcttattatggcaggcacaaacgatgaacgtgtcggacaatttcatgagggagcgcttatctgcgcaaaagaaagacgcagcgtgattattacaaaagaagatgaaacaagattaaaaggagtgaaagcaggcataaacctccctgtattttttgaccatgatgtgatcgccgtcttcgggctgacaggtgagcctgcagagattcagccattcggagaactgcttcgaaaaatgacagagctgttcattaaggaatcacggcatttagagcaatcccagtggcgtgagagaatgctggagtcctttatgatcgattggctgcaactaaaggagtggtctcccagttttcttgagaaagctcagcttcttggtgttaacctttcctcccggcgccaaatgattcttattcaggggtatgagtggtcacgtcatgatattgaacaaatggcacgcagctggaaatcctcgtaccctgcggatttgttcatcaggtggggaaatgaacggatcttgattaatcatgaagtgccgcagcatgaacaaagggatcggcttttacggaagatccttcacatttgttcgtttgccaataccgcaaacagccaatttgcagcagctggcgccggaagggctgtcgcaagctccagcctgacagattcatacgagcaagcggaaaaagcgctggctgtcagccttaagcgaaaaacgcccatatttgaagaggatctgaagcttgatatgtgtctgacggagatcagcccgggaacccgaaacgaatttccgcaaagagtattaggagaggcgctagagcatcaggaacttatgaatacgttacggactttctttcatcacgatttgtctttgaaacaaaccgcagaagatatgcatattcatatcaatacattgcgttatcgtctggctaaggctgaacagctgacgggtttacgttttgaccgtaccgaggacgtcgtcacgatgtacgtcgcactctattttttagatcaagatacaaaatagagagagtttcagtttcattttttgtatgtttctccatggaaggctttgctttttttcttttacaatagattgaaagcattttttgacagggggatgggtgaaatgatcaccaaggatgtaaaggaacagctgattcaggtctccggaccagaaaactttgatgactcgaatgccggccgtctcgtctattcatatgatgcgacgcctcagtatcagtctatgcctgatgccgtgattgctccgaggaatactgatgaagtatcacgcattttaacaatttgcagcgaacatcgagtgccgatcgttccaagaggatcagggacaaacctgtgcggcggcacgtgcccgactgaaggcggacttgtgcttctctttaagcacatgaaccagattcttgaaattgatgaagaaaatttaactgccacagttcagccgggcgtcattacgctggatatgatccgcgcggttgaaagcaaaggtttgttttatccgcctgacccgagttctatgaaaatatcaaccatgggcggaaacatcaatgaaaattccggcgggctccgcggattaaaatacggcgtcacccgcgactatgttattggactggaggttgtgctcgcaaatggtgacatcatccgcaccgggggaaaactcgcaaaggatgtggccggatacgatctcacacgtctttttgtcggctcagaaggaacactcggcattgtgaccgaagccatcgtcaaacttgttccaaagccggaaacaaagaagacgttgcttgctctttatgaaaacatcgatgccgctgctcaaacggtatcggacattattgccgcaaaaattatacccgccacgcttgaatttctcgaccagcctacacttttggtgattgaggattatgccaaaatcggacttccgacaagcgcaaaagcagttctgttaattgaacaagacgggccatttgaaactgttgaacgggatatggaaaagattgaggcgatctgcaaaaaaggcgacgccgtttccgttcagaccgcacaaacagaggaggaagcgtttgccctgactgaagcccggcgttctgcactttctgccctagcccgcctcaaaccgacgacgattttagaggatgcgaccgttcctcgctcagaaatcgccaatatggttaaagcgattaatgatattgctgctaaatatgatatttccatctgcacctttggtcatgcgggagacgggaaccttcacccgacatgcacgacagacataagaaataaggatgaaatggaacgtgtcgaacaggcttttgccgagatttttgagaaagcgattgaacttggcgggacgataaccggagagcacggagtcggggaaatgaaagcgccttacttggaaatgaagctgaaaaaagaaggcattgatgcgatgaaagcgttgaaagcggcatttgacccccggaacatattaaatcccggcaaaatgtttgcgaaagatgccagaaaacgtgtggtggcggaaagatgacaacagaaaaagaaatgaaacagatccaaaatgaatttaaagagcgtatggatgaaggagagttattaaattgtatgcgctgcggcttctgtcttccttcctgtccgacctatatcgaatcgggatttcaggaaacacactctccgcgtgggcgcatcgccttaatgaaagccgtagccgacggtatgattgaaccggatgaagatgtcgaacggtcgctgtcactttgcctcggctgccgcgcctgtgagcctgtatgcccgtctggcgtgaaatacgggcagctgcttgaggaagccagagatattatccaccaaaataaaaaacactctcttggtgaacgtgtcatgcgaaagacggcttttcacgagctgtttccgcatcaaaaccgcatgcgctcagctgtaagccttatcggtttgtatcagcgttcaggactgcaaaccgctgtgcgaaaatcaggcatgcttcggatcctgcctgagcatttgcggacgatggaagctgttcttcctgatgttccaaaaagcaaagacatgaaacatcggccgcgtttcctgccgtccattggccccatgaaaaaacgggtcgcctttttttcgggctgcttaatggatacgatgtttttaccgactaacaatgccacattgaagcttttacagctggcaggctgcgacattgtcatcccgcctgaacaggcttgctgcggggcgcttcatggacacagcggtgaaaaaaacacagggaaagagctcgcgaaacaaaatatcgctgctttcgaagcattagacgtggatgcagtcattacaaacgcaggaggatgcggagcctttctgaccgaatatgatcatttgctgaaggatgacccggaatggtcggagcgggccgccgcttttgttcaaaagctaaaggatttttcttccgttttggttgaacttgatttccatcaaatggacttagcgctcgagacgcctcaggtcgttacctaccaagattcatgccaccttagaaatgtaatgcatacgtcgcttgagccccgccagcttcttaaaagcatcaaaggggctgaattcaaagaaatggagaaagcagacagctgctgcgggtcagcgggaatttacaacatcgtcgaagctgaaatgtctatgagaatactggacagcaaaatggctgccgttaaagcaaccgaagcgattctcattgtaacagcaaatcccggctgcctgctgcagatgaagctcggcattgaacgcgaaggactaagcggtaaagtcagagccgttcacctggctgatttgctattggaagcagccgggcacaaaacatcatgagaaagcccaaaacagatattgttttgggcttttgtgcgttattccatcggactgcaaatttcgatataatgtccatccggatcagcgatataggcgaccgtctgcccccatggtttcactttcggctccccgataatcgatacgccttgttctctcatccttttgatgaccgcttctacattttcagtaacaaacccgatttcaaatgtgtttgaagcagatgtatccggaatgtccagcgccgtgatgtctctggcgctttcccgcgtattaagcgccaatatcgtagaccctgtttcaaattcgacatacgtgccgtgttcagcacgaatcggcagtcctaaaatatcccggtaaaaatgaatagcccgctggctgtccgatacgtatagaataagatatttcattgatagattcattgccaacccccctcagcatttttcaatagtccttctagcccggtatagatgcttccatccttaagctcggatctttccacatctgcgcccattttttcacagccgccacgataatgatgaagcctaacaccagcatgatgatagataatacgccattcaatacactatatcctgctgcttcaggattgagatacacattgcgcaccatccaatagcccgcataattgacagtgacatataaataggcaagcgggataaggcaagtcagaatgtaccggcgtttatcagcgattttcagcacgatcgtcgctccgataatcagccccactgaagccatcagctgattagaaacgccgaacagcgcccaaatggaaccgatatctcctgaatacagcaagtacccccacatcaaacaggcaagcgcgctggcaaatacagagcccggaatccagtctgttttcttcagcggtttatacacctccccgaagaaatcctggatcaaataacgggcaacgcgtgtgccggcgtcaatcgctgttaaaataaagaccgcttcaaacataatgacaaattggaaaaagtatgaggccaaatggctgaaaaacggcattccggtaaaaatataagtcatccccaccgcaagcgtgacggctccccctgttcttccttctaagtccaaaccgatttccccgctcaattcaggcaaatgtacgacattcatgccaagcgtacggaaaacctcaggcgtgctgttaatcgcaaagtaatcagcaggctgtaaagcggtcgctgcaatcagcgccatgatgccgacaagacactcaacaagcattgcgccaaacgcaaccggcttcatatcactccatttattcagcattttcggtgtcgttcctgagccgacaaaggcatggaacccagagatcgccccgcaggcgatggttattgagatgaacggccagacaggtcctgccagcaccggcccgccgccttttacgaattctgtaaacgcaggaaacggaatagacggattgacgacaaacacaccaacaatcaaagcgataaaaacaccgattttcataaagctgcttaaataatcacgcggtgcaagaagcagccaaacgggaagcgcagccgcaaaaaacgcataaacaggaagcgcgattgcaagcgttttcgtatctagcgttaaaaagtcaccgagcgcggtagtctgtacccatggaccaataaagactcctgccattaaaaagagaaagccgaccgttgaagcgagctttaaatttcccgttttcttataaaataagcccacacccatcgcaatcggaatcgtaatccctaccgcaaatgttccccatggattacgttcaagcgcatgcaagacaaccatcgacaggcccgccattgtgatcgtgatgataaacagcatggacagtcctgtacaaaatcctgcaacagggccaagctcatccttcgccacttccgacagcgattttccgtttttgcgcatcgatgcaaacaacaccacaatatcatggacggctcccccaattaccgccccgattaacagccacaataatcccggcaaatagccaaactgcgccgccagaattggtccgaccagcggcccggccgctgcgatcgcggcaaagtggtggccgaacgaaacccatttatttgtaggcacatagtctttcccatcctcaagcgcatgagcaggtgttggcttgtcatcattcactttgagaaccttcaccatcataaatgttccgtataaacgataggcaatagccaaaatacacattgatgctatcacaattgtaaccgcattcattttctcccatcccctttgctgtttttcataaatatatcacaatttcatggtgaaaagcggtcattttttcctatacaaaaagccggcttgaacgggccggctcgtggcagttgaaagacaagccggagatttctctccggctttgctattcttatgactgttttttcaggcggatcacattccaggaaagcggcgtgaaatgagcagttaagccgttttcgctgacagacgatgatccgttggaatgcggaacgacattttttctgttatgctggtttgtcgctttgatatcctgatgctcaagtacgatgtgctctgcgatttggtaagattcaaagcctctgagcgaaatctccgtctccatctgatcctcagccttgtttaccgcaaaaatagtgagggtttcttcctcttcagagtacacaacagcagcatcaacatatggcacatcagtgaaatcagaacaatcgtacttaggagaagaaataagcggtttcagtgactcgccccttccgtaaacagaagcatgcatgtatggatagaaaatcggctgtctccatgcttctccgcctttttccgtcatgatcggcgcgatgacattgacaagctgtgcaagacacgcaattttcacacggtctgcgtgctgcagcatcgtaatgagcagagagccgactaataaggcatcttcaaaattgtaaatatcctctaaaatcggacgcgcagtgatccacggctcgacttttttatcagcctcatttgagtggtaccatacgttccattcatccagagagagattgatagttttcttgctgcgtgtttttgcttttacatagtcacaggtcgcagcgactgatttgataaaatgatccaaatccatggaacgggccaagtagtttggcagattgttatcccggtttccgtagtaggtgtgaagagagatatagtcgacatgctcatacgtatgctccagcaccttcgcttcccaatcgataaaggtcggcatgccgctgtttgagctgccgcaggcaacgagttcaattgatggatcaacccatttcatgacctttgccgtctctgcggctagccgtccgtattcatcagctgttttgtggccgatctgccacggtccatccatttcgtttcctaagcaccatgttttaatgccgtacggctgttcatagccatgcgatcttcttaaatcactccagtaagagcctttcgggtggttgcagtattcaacgagattacgggcggcatctatgcctcttgtgccgaggttgacggccatattgacctcagtgttcacctttttggcccaagataaaaattcatttgttcccacttcattggtttctgtcgtttgccatgccaagtcaagccttctcgggcggttttcgactggtccgacaccgtcctcccagttgtatccggataaaaagtttccgcccggatagcggatgatgggaacctgtaattctttgatcagcgactgaacatcttttctaaacccatcttcatccgcttcagggtgatcaggctcgtatatgccttcatataccgcacgacccatatgttcgataaacgagccataaatccgtttatctacttcaccgattttatattctttgtctacaatcattcgcgcttttttcatcacacgtttcctccttcattaacctttgactccccctaccgtcaggccggagataaagtacttttggaaaaacaagaaaatgataatcaccggcaaaatcgcaaatactgagccggatataagcatgtcgtaattatttccataagggctcagcaagctggacagccctattggaagcgtaaacatttctttcgaccgaagcacaatcagcggccacaagaagttgttccagctgtttaaggactgaaggataatcatcgcaccgaaagccggtttcatcagcggtgccataatcctgaaaaagatgccgaattccgtacagccgtccatccttgcagagtccagcagatctcttggaaggccaagagcatattgcctaaaaaagaaaacggcaacaggtgaaacgataaacggcaatatgacacctgtatatgaatcgatcaagtgcagtccgacggtaagcttaaacagaggaagcatcatcacttccagcggaaccatcatgataatcagcacaagaacaaagatgatatttctgcccttaaaatcataaaccgcaagcccgtacccgatcatcgaagaaaaaaacagggtgagcacggttgtgaaaagcccaagtacaagactgttaaaaaaccatttgaaataaatgcttccgccgttaaacagaaatgtataattatcaagactcattactttaggatcaatgtcgagattgagccccacacgcaaaagctcagatgacggctttaatgatcctaaaagcaaacagaaaatcggaaaaagatacaataggctcagcatcataaaaaacagggttagtgcgattctgtaaacgctgaactgaggactgtgccgcaacatttatccctcccccttaaacgagcctgacagctttaatgaaatcaggctgacaacaaggatcacaatcaaaagcacgatgccgatggctgctccgtaccccatttcgttgtaggcaagcccctgctgatacaaatatccgacaagcgtcagaccaatattacccggggaattattctgccaaaggacgtagctttcctcaaacatcctgaagccgccgatgatgctgatggtcagcacatatacggttacaggcttgagaaacggcagcgtgatgtgcagaaattttttcattgtattcgcgccgtctatatcagcggcttcgtacagctctttcggcacattttgcaaaccggctaaaaagtaaaggatgttgattcccatccatctccatgaagcaagcagcaccatcaaaaacatgccggtatgttcattgttcatccagttctgaggtgaaaagccgagtttgagtaggatggaattggccagagacgtttccatttctccgaagatcagccgaaaaatgatccccgcgacaatggttgaggtcaatgccgggataaataatgctgatttaaatatatttctaaatttgaccagctttgaattcaggaatatggccagaagcaatggaacaggaatcagcacgatcagcgtccaaaaggtgtattccagcgtattccaaagggcggtatagaacgtcgggttgtttagcgctgtataattagacaatccgacaaaggacacctctcccggcaaaattctttggaagctcatgatgaagacactaatgatggggtatagaaaaaatacgagaaaggataaaacgaatggcgctgtaaacagatagggcgccgctttttttgaataaaacagatctcgccagcctgattgtttcgcagctgaaggaacgggatgaaccgttcctgttttcacaggtttcatgagaacctccccgctttcactttttgaatgggattctatttctgtttcagttcacctgccgctctgtccaaggcttgtttaggcgttttttgctgagatttaagtgcgtcgaacaacacgcttctgttgacaaggtctgaagccttggcaaaatcctcatgtaaataaatcggattgatttcatccttgatatcgagcagcacagaaaaaatgcctgttccgttttggaagtaatccgtgtatttgtttttctctttcaattccttggagctccaaacatcccagcgaagcgggtcaaagccgagtacgctccagagttttttatttccttcttcagagcccttcgcaaaggccaaaaactcttttgctaactcaacatgcttggattgcttcggcacaacggttgccgtaccgcccaagcctgccgagcggtcgcccccctctttccatgccgggagcggcctgatggcaatcttccctttcagatcaggcatataatcgataaatcttcccatataccaaatcggcatgaggactgaagcagctcctccttggttcataaagccgtagtattcttcactgtgatgcccgccgcccggcgcaggaatcatcgttttatcattgatcatgtcttttaaatattgaagtgtttttacgttggtgtcattattgaggatcagcttgccgtttttatcaaaatagcctgagttttgctgtgaaatcatagataagaacgttgcggaatcatttgtttccaccgttcccatcggcttcccggtcactttgcgcactttctgtccggctttatggtaatcatcccatgttttaatatcgtcaggattgacgccggcttttttcatcacatccatgttataaaacatgaccgttgttcctacatgcgtatcgagtccgtaaagcttgccgtttttgctgtacagggtcagccgcgcctcaacgaatttatcgcggtccttttcaatcagcggagtcaagtcggcaagcggtatgtcagagcccttcaaaaagtttgaaaaacgggccaattcgacatcggcaatatcagggacgccttctcctgcaattaaggagatagacaagttatcgtgcatttgtccatacggataaacgaccgtattcagcttaattttgcggtcaggatatttttcattccattccttcaccatttctacatagaactgctcatgaagtccgttaaatgtccaaaaggtcagctcggtttcacccgacttcccggatgatctttctgctgaacacccagcaatgactaatgtcaatgtcagcaacatcatgagcacaagaaaacagacagtcatttttttcatctgcgttaccccttccattcgaggtgcgggctattcatatagaccatggttgatcagcgttttgttttcattgatgattcttaatccggtgcagcggtctcttaaggtgtgcgcgtgtctgaaggcattcttgacggaatcctgcccgacaccgatttcgtcaaaatacgcagggcctccggctgatctcagccaatcagccagcacttctccttccgggagagtttgataagccgattggatggcttgccgccggctcggtgaaaattcgttcagcccgtcatccttagcgagctttctgtatgtgtcagttaataaaacagctgcacagcccacctttgccccatgaagaatctgtggccgttttttctccattaattccatctcaatccaatgtgaaatatgatgctcgccgcctgatgccggtcgggaatgatctaatgccagcatgacaagccccgatacaagtaaagactccatcaaaacccgtatgccagtttccgttttcatcgcaatgtcttctgtgtgttcaatgcaggcagcaagcgcctcctgaacaatcttagctcctgctggcgaataaggctcgccggcaagatgccgggatatttcccaatctgctaaagacgttattttaccgagcatgtcaccaaagccagctgccaccattgactgcggtgccgcttttaatagatccagatcagcgaacagtgcagatggggccttcgtttgaatggttgttttcgtgccatataaaataatcggcgcaccggctgatgtaaaaccgtctacagatggagcagtcggataagaaataaacggcaaatctctttgaaacgccgcaaagcggacgatatcatgaatcgtgcccgaaccgactgcgatcatgacatccgttggttgtttcgtatggatcagcacatgaatgagcgatcgttcatcagctgtcacatctccggcttcattttctggaatgatcaggcactcggcctgaaatccttcttgattcagctgattttccagatcaattcctgcaatgcggtgtgtattcgcatcgcagacaaggacaatatgtttattgtttttttgttttacgtaattcaaaagcgaatcagctgcttgtttaccgagaacaatttcttcaacttttataggcaacgtcttttctccggcgtgttcaaaagcacgctgaacgtcagctgcgatacgattcatatcagaatcccctcctcagccaatttggttacatccttaatagaatccagcacataatccggcgtgtacaaacgctgttcgccctgtttcgcagaaccagttagcactaaggcgcttttcatgccataaagcttccccatcgcaatgtcagattcaatgctgtctcctataatcatgcattcatgtgcggacagccccattgctgtacaggcagcctccgccatcagccatgacggttttccgacaacaagttcagtcttcgcttgtgcggaagcctctatcgccccaatcattccagccacatcaatggcatttccgtcttcgttcggaaaagagcggtctttgtttgtagcgataatacgagcgccgccggcagccgcttgaaaggcttgatttaaatcgtcgtacgtgagcgtttcatgaagggagatcacgagccaatccgcttccttcggttcgttcgcgttctgcacaccggccagcctcagctcgtcaaccaagccttgttccccaagcacccatacctttgaaaaacgataatgttttttcagaaaagccgctgtcacgcttgatgacagaacaatgtcgtttacgtccgtttcaatccccgcgccaagaagtttttttctgcacatggcacgggagatattcccccggttgcttaaaaagacgattttctttcccattctcctaagcgttttgatcgcttctcttgctccttcgatcaactcatttcctctgaatacagtaccgtccaagtcaatcagaatgccagccggtgacacaggcgtatcatgactggccataatacgcatttgctccgtgttttcgataaaaatgcttttcatgcaggactgtattgattggggttacatccttgttcagcataatggagtgataggccatttcggcaaccgtttctaatacaactgcgttatgaatggcatttaaggcgtcagtgccccagcagaacggtccgtgattattcacgagcacacccggcacctgttcgtagttatgatgctgaaaggtttccgctatgacttttcctgtattcagttcgtagtcatgaatgatttcttcatcgtacatttcacgagtacatggaatcgcactgtcaaaataatcagcatgggtcgtgcctaacggagggatgtctctgcccgattgtgcccagcttgtcgcccattgagaatgggtatggacaattcccccgatattcggaaaggctttatataaataaacatgggtaggtgtatctgaagaaggcttaagcgagccttcgacgacctctccatcaaggttcaaaacaaccaagtcatcggctgtcaggtcgctgtattcgactccgctaggtttgatgacaattctttctttttcacggtcaatgccgctgacatttccccacgtaaaggttaccagctgatgctcttgaagcttcaggttggcagccagcacttctttttttaatgtttcaagcatgctccatcaccctttatcaattctttttggcggcagatgaaaattgaagatttttgatcgttttcagacgtttcatgacatggttttcttttccgaaataatgaaccagctctttatattcagcgtacaatttttcataaaccgcggcgttttcggcatttggcgtataagttatatctttcagttttcccatgttcgccgctgcctctttgatgtcatcgtagccgcctttttctttgcctgctgcaagcgcgccgaaaatggcagatcctaaggctggtgcttgcggtgaaccagagattttaatgtccatgtttgtcacatccgcataaatctgcatgacaaacgggtttttctcagctattccgccggctgcgtatagttcctcaatcggaacaccgctttctttgaatgtttcgataatcattcgggttccgtaagctgtcgcttcaactaacgctctataaatctcttcaggcttcgtcagcagtgtcatgccaagcagcatccctgttaaatctgcatcaacaagagttgaacggtttccattccaccaatctaaagcaagcaagccgctttcaccaggcgcttgatggtttgctttctcactcagcagctcatgaacgccaatgtttttttcctttgcttcctcttgataagctggcgggacacatgttttcacaaaccagtcaaaatgatcgccgacacaggactgcccggcttcatatcccgcatagcccgggagaattccgttgtccacaacgccgcacattcctggaacgatatgcacctcttcaccaagtagaacatggcacgtcgaggttcccataatcatcagcattttccctggctctgtaatgccgaccgccggtacggaaacatgagcgtccacattggcaaccgcaacagccgttcccgggagaagtccggtcagctttgccattttttcagtcagactgccggctttttctcctactgaatgaatagaacctgacaatttgtcttttgtaatcgttttcattgaaggatttaatttctcaaagaaatcatctgacggataccccgctttttcactccacatcgctttataccctgcggtacaattgcttcgcttgagcgagccgcacagctggtacacgatccagtccgcagcctcgatgatccggtcagccgcttcataaatgtgaggcgcttcctcggcaatttgcatgacctttggaatcatccattctgatgaaatttttcctccgtaccgctgtaaaaaagcctctccttcttcttccgcgatttgattgagccgatcagcatgtttttgggccgcatgatgcttccagagcttcacatagctgtgcggctcctcttcatattcaggcagcatgcataacggctgcccgctgctgtcaataggaaggatcgtacatgccgtgaaatcaattccaatcccgataatgtctttcggttcaacgcccgtctgttcgagtaaagacggaatggttgtttccaagacttcgaggtaatcagcagggtgctgcagcgcccagtcgcgcggcagcttttgacccgtttttggaaggacggtatcaatgacagcatgcctgtattcttttacagcagccgcaagttcctcccctgtttggacatgaacgagcaccgctcttcctgataaagttccaaaatcaacccctattgtgtaagccatgtgacatccccctctacttttgaagccggtaaagcgcctcgttccattttaactcgtgtttcagtttatgaattgtcgtatcacgggaaatgagaacactttcgatccccgccatttccgcccaatcaagcatttgctccgctgtcagttcataagacaggcaggtatgatgtgcaccgccggctaaaatccatgcctccgctgctgttttcaatgacggctccggcttccagagaacacgggcaaccggtaaattcggcatgtctttttcaatttcctggccggtgacttcattcagcacaaggcggaaacgcccgccaatatcaacaatgctagcttgaatggcagaacccctgatgccgttaaatacaaaacgcgcagggtcctctttgccgccaatcgaaagcggatgaacctcgattttcggctgatccaaagcgacagtcggacacacttcaagcatgtgagagcccagaatcatttcatttcccggttcaaaatggtacgtgtaatcttccatgaaggaagttctttttcctttagccatgattttcatcatccgtacaagggccgctgtcttccaatctccttcaccggcaaacccatagcctttctccatcaggcgctgaacggcaagtcccggcagctgtttcattccgtgcagcacttcaaacgatgtcgtaaacgctgtgtatccgccttgctcaagaaaagcggttaagccaagttcaattttcgcctgttctttaatggacgctacctttgcttcgtcacgttttgtttcctcactgatcacatatagtctgtcatactcggcataaagcgtgtcaacctcgtcgtccgtaatgcggtccatcacttcaacgagatccccgatgccatatccgtcaacctgccagccaaattgaatatgcgctcccaccttgtctccgtccgttaccgcgacatgacgcatgttatctccaaatctggcaaccttaatatgtctgctttcatttaatgcagccgccgtatccatccactgggacatttcttttttcacttcttcatcatcccaatagccggcaatgacttttcggctaagccccattctcgagttgatgtaaccgtactctcgatcgccatgcgcggattggttgctgttcataaaatccatgtcaatcgtaccccacgggatatcgcgattatattgggtatgcaaatgcataagcggtttttgataagaggaaaggccttctatccacatttttgcaggggaaaatgtgtgcatccatgtaatgatgccagcacatgtctcactgtactccgcttctcttaacagccctctaatggtttccggtgaagtgacgacgggcttatgagtgattttatatctggaagaaatcccgctgagcccctcacaaatgcttttagcatgctgatctacgagttccagcgtctcttccccgtataggtgctggcttcctgtcacaaaccagaattcataatcctttgtctgaagcatgtaaactgcccctttctcataaaataaaacgctttcaaatacaaaagatacgtactaatgatagaaaataaacctataaataaatatttgtacgaacaattttattatagtaattgactattatactgtcaatcttttctttttaaaaaagccgggggcagagcccggctttttgattcaataggacggccagcccgagctccaattcaaatcattgatgagaagctttggaatgccgttgtcattggcatcataggcatggcgaacaagaatgtttccgttcacaatatcctggcctccaggtcctttccattggtcattgcccgaatccaaaatggtgcctccgccttcaagcatgctttttccgcttttatcaagataagggcctgtaatgtttttggatcttccgtaagcaattttgtacgtactgtttaccccgtcacagcatttatcaaatgaaaccattaaatagtaatagccattttgatacgtaagagtaggagcttctaaggcacccccattattcggtctagctgcaatcgaatagagcgagcctgtaggcttcatcgtactcttatcgagcttagtcagcttaatgccgctccaaaacgagccgaatgcaagccacggattgccatccttgtcgaatgtcagctccgggtcaatggcgttataattatttgagcttgtcgaacgaatcaccaagccctcgtccttccagctccccgaactgatgcttgttgaagatgccaggccaatggcagatgtattgcttccaaaagaagaaacggaataatatagccagtacttgccgttatagtattggatgtccggcgcccactggttttgaccataattcggcacataattggaccaccacgatagcggtgtagtgaaaatggatttttgtacggtccaatttttagcgtctgaagacttcaaaacccgcagtccccgttcttcagtaagccctgttccaagcgcataccatgagctcccctctttaatcatagtcgggtcatgaagcagctcattggatgcaccccaaaacgctgcctctgcgggagcagcagaagtgaatatcaaacctgcagccagagctgcactcgaaaagtgtaagaagcgtttccatgtttttttctttttcaattttgtttaacctcctttatattagaaagcgcttacaaattagattgtttatcctcccttcctgtcaaatcgagctgcgtatcgtatatcgtcatgttcaggaaattttcggtatcccctttattgtagtcactatgctgtaatttgtacagacaaaaaaatagaatccgcctaaataggcggattcttccgtatctttattggtacgtaatttcgtcaaccgtttttcggtctaacttcttaatgacttccgtaattaactttaccgcgttttcataatcatcacgatgcagcatggccgcgtgcgtatgaatgtagcgggttgcaatggtaatggacagcgcaggaacgccattcgccgtcaaatggatggcaccagaatcagttccgccgccggcaatggcatcaaattggtacggaatgccggcttcctccgcagtggctacaactgcatcgcgcaaacctttgtgagagaccatggatgcatcgtaaacgataatctgcgggcctttgcccattttgctctgcgcttctttctcggaaatgccaggcgtgtctcctgctatccctacatcaacaccaaacgcaatatcaggctgaatggtgtgtgcagccgttttcgctcccctcaggccgacttcctcctgcacggttccgacgccatacactatatttggatgatctgtgttttgtaagtttcttaacacatcaattgcaatcgcacagccaatgcggttgtcccacgcctttgcgagtaggaatttttcattgttcatgaccgtaaattcaaaatgcggaacgatcatatctcccgggagtacaccccactccaaggcttcttcccggcttgaagctccaatatcaataaacatgtcttttatttccactgatttttttcttgcttcaggagataaaatatgcggcggcttagagccgataaccccagtgatttctcctttaattgtgacaacggtgacgcgctgggcaagcataacctgagcccaccagccgccaacggtttgaaaacggataaagcctttatctgtgatttgtgtcaccataaagccgacttcatccaaatgtccggcgatcataattttcgggccgttttctgcaccagtttttttggcaattaaactgcccaggcgatctgttgtcacctcatcagcaaatggttctatgtatgatttcatcacttgccttacttctctttcattgcccggtatgccttttgcatctgttaaatctttcagcatggtcaatgtttcatctaattttgccatgttccaaaccctccttcatcagtcctgcattcttattatacaaaacatggcgctaaccatacgactatttcacttgaaaatcgggtatatgtttttacagctttcttttagaaaaagtgaaacctttttctatgcttttcgtattacatcagatcatcaccataagggaggtgccttcacacaatgtttgtcatggttctaaggattattttgcttgcactttttgcttattgtatttatgccgtggtcaaatatgtcgcgaatcctaagagaaggcttaagctggcccaatcaaaagaacatttttatattattgatgaacaaaacaatacccggaagaattttcagctgacgtataaaggcgtgctttttgagggagaaaagcatattccttccaaggaccatccgctgtttattcacacgatctttgtctggacagaatctcctgagaagctgaaacatttctctgcaaaagattttgagaacattgaagaaaaagtgctggaacgatatccaaattgtaagattgactgggaccagcccattaaactcgcaaaaaaagcagaagagcgttaaacgcttttctgctttttataaatcaaacgggctgtagtaaatagcgatgagaatcgcttcaattaccagaagaagcggtactccatacttaaaagaagcgtgtttcgttttatgtctgaaggtttgcatgccaagccagacaccgagcgctccaaatacgatggctatcagccacagccggtcttcagaaattctccacttgtgctgttgcgctttgcgtttgtcaatgcccatcacccaaaaaccgcacagattaatcaacaccaaataagctgcaataatcatgttgcctcatcctttatatagaaaaagccgctctgctggagagcggctctatatgattacttgtttaattgagctttagcagcatcagcaagctgattgaatgcagtaagatcgtttacagcaagatcagcaagcattttacggtttacttcgataccagaaagcttaagaccgtgcattaaacggctgtaagaaaggccgttcatgcgagcagctgcgttgatacgagtgatccaaagtttacggaaatcacgttttttctgacgacggtcacggaaagcatagtttccagatttcatgacctgctggttagctactttgtataatgtatgttttgaaccgaaataaccttttgctaatttaagaacctttttacgacgcttacgtgtaacagttccgccttttactcttggcattgaatttccctcctaattgttccttatccgattacttgatgttagcaagcatttgtttgatacgtttgaagtctcctgcgcttacaacagcactcttgcgaagcttacgcttttgcttttgagatttgttggcgaataagtgacttgtgtacgcgtgagaacgttttaacttcccagaacctgtctttttaaaacgtttagcagatccgcggtgagttttcatttttggcatgggatttcctccttattgcttttcgtttttcggtgcgagcattaagaacatgctgcggccgtccatttttggttttgtttcgactgtcgcaacctcagcacatgcttcggagaaacggtctaatacacgctgaccgatttctttatgagtgattgcgcgtcctttaaagcggatagaagctttcactttatcgcctttttcaaggaatttaatcgcattgcgcaatttcgtgttaaagtcatgctcatcgattgtcggacttaaccgaacttcttttaagttaatgattttttgattcttgcgtgcttctttttcctttttctgctgctcaaatcggaacttaccgtagtccatgattcggcagacaggcggttttgcattcgctgcaactaacacaaggtcaagatttgcgcggccggcgatttcaagtgcttcctgacgggacttgattccaagctggtcgccattttgtccgattaaacggacctcacgtgcacggataccctcattaaccaattgatctttgctaataatgagccacctccatagtttcttcgaattgattcacaactcattttgtatgcattttgcaggcaaacaaaaagtgtgggcattataaaacacccacactacgaacatctgtatcaataaaaatgtacggtcaacctgccaactacatgcatgtgtcaatcaggtgagaagcgggtgcttctgcttgtgatttatattcaattcaataactattctacacaataccggatctttagtcaaggacgacttatccggaacaacttttacattgtaacatgggttttctatgagcgcaagagagaaaaagaaaatctttcatcccccccagaatgcaaagaaccaacaattccccccttatttcgcaatttacaacaaaaccaccgacaggaagaaatgtaaaacaaagttaatctctgaccgatataagaagcagaagggagcctgacacatgaacaaactgatacagcttgctttatttttcacattgatattaaccggatgctcaaatagcagcacatcttccgaatcaaaagtcgaaactgttaagacaactgcagcatttcctcaaaaggggctggagaaagagctaaaaaaactaaaacccgtttcattggacatgaagttcgagagtccacttgctactgagttaggaaagcggaaggcaaaagaagaagctgaaaagcaaagacaaatcgccgccgagaaaaagcttgaaaaagagcgggaggcgaaacgaaagaaacagcacgaggaaaaagcggagagacagcgattagcagagcagcaggcggcagagaatcagcgattagcggaagcaaaaagacaagctgaacttgaaagacagcggcaggcagcaatccaaaaagagcagaaagcgaacgctgagaaaaagcggcaatcgcaggcacaacggcagcagactgaggcacccccatctaatagtcaagatccaccatcttcctcgagtcagacagataaaaccattcaacagccagcttcagagcttcctgatgacgatggttatggttatgaagaacgaaaaaagtggcatgacgatcaagtagaatggggcattaaacaagggtatatcgatcccgaagacgcaccataaaataaaaaaagccaaggcattcagccttggcttatccaccgatcagctgcacgaacacagggatgaccagaaccgttaccactcctactacgacaacagcaatacttgccatcgcagcttcaacttctcccatctcaatcccgaccgctacaccaagtgcatgtccggatgttccaagagccaatcctttagaaatcggatttttcactttaaacaccttcaagaacaatgctccgagcgcatatacgatgacagcgttaaagatgaccgcaaaggctgtgatgtcgctgatgcccccgatgccttttgataaaggaagcgcaattgccgttgtagccgcctgcggaagcatgcttttcattacggccgaatcgagatgaatgcctttagcgagcaaataaacaatcgtgacagagcagatagagccggcaataatggaggccatgatttgccaccagtactttttaagcttatctctttgtttgtacaaaggaattgcaaatgcgatcgttgccggttcaaggaaaaacttaatgatctctcccccgttattataatccgcgtaggaaaaaccgccgatttttaaaaatgcgatccccagcaccatggcaacaaacaaaggagtgaaaaggaagaagcctttcgttttcttaaataaaaaggtgccgatgccgaatgcagcaagtgatacgacaatcccaaaataaggactcattgtgctttccatgtgaagaacctcctgtttcccttaatggtgaacgagttcgttattgttctgcgggctttgcactgtttttgttttcatgtccgctgcggttttgcgttttccgctcagcgacagaatcagctgagaaaacaatcccgtagcccccagcaaaataatcgttgcgagcagaatgacaagaacaatttgcaggccgtattgctgcatcacaccgagcgaattcataacagatatacctgacggaacaaataaaaatccgatcagagaggtcaaagacgttccgagcgtctccacttgttccagtttaatgactttcaaacataataggagaaataataagaccaaccctacaaccgatgccgggataggtattgggacaatagcggcaatcatatttgaaaccagcataatgacggcaaaaataaatgcttgtgttaaaaacccgtacacttttttagcactcattttcttcacctctttctctttggtacccccattataaataagaattccctgttataaagcgcttacaagataacatgccgaatagcgggtctgagttgcagaatcaaatggctgaaatgcaaaaagccgcccatcaaatatggagcagctttttcaattccttcgcatatgtccggctgaccggtattttcgatccgtctttcatgatcaaattatacgttgaattaaaccatggctgaatttctttaatatattcggtattcacgacaaagctccgatggacgcggataaaatcagaatccggcagctttttctcaatcacaacgagtgtatcgctgaccgtataagaatgatcgaaggtttttacattgacatgaccatcttctgttccggcatagataatgtccttcgtatccacaatcacaatcgattcccccacagatagcgcgagcttgtgctggccggcatggctgttttgctctgtttctacaatatcccgattgacttttttatattttttcagcgtttgctgaattctttcttcatcgaatggcttggttaaataatcaagagcatccacctcaaacgctttgagtgcatactggtcatacgctgtcgcaaacacaacagcaggaggatgcttcattttcttcaatcgctttgcgatatcaaaaccgttttctccagataaatcaacgtctaaaaacagcaaatcaggtttttgatccatcatttggtcaaaagcggattcgatattttccgcttcattgatttccatttcctcattggtccgcttaagcaagtaagccagttcatctcttgccagcatctcatcatcaactattaacaccctgagcatgttcttctccctctttcatctgttgcattggcacttgaaaggaaacctctgtccctttatgaacctcactgctgatatgcagtgcagcctgctgtccgaataaaccgatcagccgctgatttaggttataaagcgctgtaccggttccctccttagacggaaacggtttctttcccagttccggcaagacgtccggcggaattccgcgtccgttatccgccaccttcatatagacggatgcattatcagataagacacagactgtaaccttgcatatgtcttgttttttcggaaacgcgtgccgaagcgcgttctcgacaagcacctgcaaaacaaacggagggatttcaatctgctccagtctgctgtcgatattaagctcaattttatatttcccgggaaaacgcgcctgttctaatgacaaataggcgttaagatggtttagctcctttgagagcggaatcagcagctgtctcgctccttgaaggtttgaacgaaaataaacactgagctgcaataggagcttacgggttttttcaacatctgtacggcatagcgcagaaatcgtgttgatcgcattaaataaaaaatgcggattcacctgtgcttgaagcgctttaatttcagcatccttgagaagtttgctttgcagctctgcttccccaagctcaagctgtgtcgaaaacagcatggccagcccctcggcaagttcctcctctacctgactcaggcctgccgggcttttaaagtacatttttaaggtgccgattgtattgccgttcgatgtcagcggcagaacaattgcagcgtgcaaagggcattcagcatgcgtgcattcaatctcttcctgcgaaatcgccttcataatatgccctgttttaatcacctttttggacagcccggtgatcaaacttttcgatgggatgtggtgatccattcccgcaccgacatgcgcaaggatcttttctttgtcagtgagagacaccgcatctgttcctgtcagcttatggataatagccgctacacttttacaggagttctcatttaatccttggcgaaaaaatggaagtgtctgatcagcaatcgtcagcactcgatgcgtttcgagagcccttgcctgttcttccttgcgaatgatcgcttgaataatagacagaaaaataaaactgcctgttccattgatgagtatcatcggaattccgatcatgctgacaagctcccaagcgtcactgaacggctttgccatcagcaaaataatgatcatttgcagtgactccatgccgattcccacaagagcggcgatgcgcggtgtcggcattcgatatcgcttcgtaaaatacctgccgatcaagcctgcaagaacacccgctaaaatagatgagacggcacagcttaaggccgtgctgccaccgagtgaaaaacgatgcaggcccgcaagtatgccgatcccagcccctacaaaaggacctccgagaaggcccccgatttccacgcccaaaatacgggtattcgcgatagagcccgatggatctatcgtaaacacccagtcattgtttacaatcatatttctttgaatttcgatgcctgtataattgctgatgatgctgaaaagagaaaaaatagaaattaaaatcgcttttcctttatagccgtcctgattctgaagagcttgtctgaaaagtttcgtatgggcgagaatgaaccctaatataacaataatccccactctctccagcatcataatcattaaatgaatcattcatgtcacctgttctttccgttttcattctagcatgttttcgttttacggctgactgtttttttaaaatcgtctgaaaacatatttcacaaggcttttatctattgtaaaataaaacatgagccttttggcagaaagatttgaatctgaagcagaggagaagatcatgaaagccgtattttttgatttagatgatacactactttgggacgaaaaaagcgtcagaacaacatttgcagaaacttgcttacaggcggagaaaaaatatggccttgcccctgaggaattcgaagcagctgttcgcgaagcggcgagagaattgtacatgtcatatgagacgtatccatatacagtgatgatcggcattaacccgtttgaaggactgtggtccaatttctcagagccaatcagtgaaggctttcaaaagctgaacaagattgtgccggagtacagaagaaatgcatggacaaacggactgaaagcgcttgggatcgatgatcctgcatatggcgaatacttgggagagttttttgcggcagagcgcagaaagcgcccgtttgtatatgatgaaacttttgctgtactcgatcaattaaaaggcaagtatgaattattgcttttgacaaatggcgatccgagtctgcaaaaggagaagcttgccggcgtacctgagctcgctccttacttcaatgaaatcgtcatctcgggcgcattcggcaagggcaagccggatgtttcaatttttgaacactgccttaagctgatgaatattgaaaaagacgatgccatcatggtcggcgataatttgaatactgatattttaggcgcttcaagagccggaatcaaaaccgtttggatcaaccggacggataagaaaaacgaaactgacgtaacgcctgattacatcatcagcagccttcatgatttgtttcctatattagagaaataaaaaagcatgatctcttcaacgagatcatgctttttattttattttttcgcttcagctactgcctttttcacaaactcatcaagtgaaatggtttcagagttctgctctccatacttacggacgtttaccgctccgttttctgcttcttggtcaccgaccaccagcatgtacgggattttttgcatttgcgcttcacggattttgtagccgattttttcatcgcggctgtcgacttcaacacgcaggccttcacgctgcaggcgttcctgcacttttttcgcgtagtctaaatgcacagccggagaaaccgggatgacttggaactgaaccggtgcaagccatgtcggcagcgcgcctttgtgttcttcgattaagaaggcaacaaagcgttccattgttgaaacgacacctctgtgaatgacaaccggacggtgctgcttgccgtcctcaccgatgtatgtcaggtcgaaacgttccggcaataagaaatcaagctgtaccgtagacagtgtttcttcttttccgatcgcagttttcacctgaacatcaagtttagggccgtagaatgccgcttcaccttctgcttcgtaatagtcgtggccgatttcgtccattgcctctttcagcatggattgcgctttgttccacatttcatcgtcatcaaaatatttctctgtatcttccggatcgcggtaagacagacggaatgtgtaatcacttaaaccgaagtcttcatatacatcctggattaaacggactgtacggataaactcatccttaatttgatccgggcgcacaaagatgtgtgcatcatttaacgtcatcccgcgtacgcgttgaagccctgacagcgcacctgacatttcatagcgatgcatcgttccaagctccgcaatacgaatcggaagctcgcggtaactgtgaatgtcttgtttgtaaatcatcatatggtgtggacagttcatcggacgcaatacaagtgtttcattgtccatttccatcggagggaacatgccttcctgataatggtcccaatgccctgatgtttcatacagctctttgctgccaagcacaggtgtgtatacgtgctcatagccgaggctgatttctttatcgacaatgtaacgctcgatgacgcggcggattgtcgcgccttttggcagccaaagcggcaggccttgtccgactttttgagagttcgcgaacagctttaattctttgccgagctttctgtggtcgcgttctttcgcttcttctagcatacgaagatgctcttcaagatcagcttttttgaagaaagctgtaccatatacgcgctgaagcatttggtttttgctgtcgccgcgccagtatgcgcctgcaaggcttaacagcttaaattctttgatttttccggttgaaggaacgtggacgccgcggcacaggtcaaagaattcgccttgctcatagatcgaaacggtttctccttcaggaatcgcatccaatagttcaagcttcaggtcgtcgccgatttccgcaaaacgggctttcgcttcttcacggctgacttcttttcgaacgatcggaaggttcgcattaacgatttttttcatttctttctcgattttcggcagatcctccggtgtaatcgcttcgtccatttctacatcgtagtaaaacccgttttcgataaccggaccgacgccgaatttaacatccttgtagatgcgtttaatcgcttgagccagcaagtgagccgtactgtggcgcataatttgaagaccttcttctgagccttctgtaatgatttccactgtaccgtcttcattgatcggcgttctcaaatcgatttcttttccgttcagttttccggctaatgattttttctttaatcccggactgatggatgccgcgatatcttctgttgttgttcctttcgcaaactccttgactgctccatcaggaaatgtgatttttaccatatctgacatctttgtcactcctttttttgcatataaaaaccccgccccctatgaaagggacgaggttgaataaacggaatcgtggttccacccttttttccgcaaagccaatacggcacctgcggctctaagctctgtaacgggagttcccgtcagccattactgttccttttcaagaggttcacagctgaagttcaaaggcggtaaagcgaatggtccttagctgggaagcttgcagccagggcttccctctctttgagctggtatcattccttcgtgtccttatcaatacgtgtgtctttcttaatctcctatgtattataaattgttcaatccaaaaaatcaacacgatcgcgtttccttttttaaaccgacagccttaaatagacaggctgccggccctcatccttccgagtgcttcaccggtatttctgcatctgtaaaagcatgcagcgggagcatttccactctctcttgaaatacgttttgaatggtccttgccatcatgtgctcgggctggtcggtataaagcacgacttcatcaggcgcaatggaaatcagcggcgcgagcaaatgagaatcaatatacataggatgatcccggacaaatcttctgtctatgtatttcattttttcccgttccggcacatagcgcagctcccataatgtaaaggaaccatcatggacaatatgcacttttttgattcgcggctgtttggcgtccacatagtctctgagtgtttgaataaagttttgatattcctgttccatcttatattcatcaatcgctgcttctgtaatatctctcagctgcttatagtatgatccaagtcggaaggtctgaaaggagcgaatgtaaaatactccttcctctaaacagatcgtttggagttcatccaaaattgattgtttccgtgaaagcttcagcggctcaaacggaagatcgtctgcttcaccttcaataatactgtgtgcgagctgaaggatttgctgctgttcatcctggtccgtgaaacaataagtttcctcaatcaatgacagcatatgctcgtcttctttgcattccaaaaaaaatttgaccagaatcggctccataaaacgctgaataggaaaagccggattcgctttttcaatcccgatttttcgtatgccttcacggacaatgatattgttccgatcgtccgaatgctgaatgagatgtaaaaaagcggctgcatcatggtcatcttcaaagattatttcaagcatgtttgtccccccttacggcatctgttacaagtatatgggggatgtttttaaaatagacgtaaaggtcattggcaaatcttaatttgattcttggaacaagttttgcattttctttctgaagatgaacggcaatgagataaacacgatatacaaagcgagcaccataaagaaagcgggcagattgccagccaaaaagctcgcacccagcacattaagcgcaatcgtcccagggatgattcccacagccgttgcggcaaaatacggcagcgctttgacattggaaaggcctgccgcatagctgacgaaatcaaaattgatcggcaggattctcaaaagaaagatatagaaaaatccgttatcctccatttgcttctgtatggcttcaagcctttcgtaatgcccgttctttttcgccgaaaacaaaccagccgcaaaaaacgaaacagctgaagcgcacatcgaaccgaataacgtataaagcgtgccgagaagcgggccaaacgcaagtccgccagctattgaaataacagacaccggaaataaaacaagtggcctgacgatggatatcccgataaacatcagaggtgcaaagactccgaacgacaatacccataccctgatttctttcggcgatacattcaaatacgttttatttccccaatagagtaaaccagcacctgcaagcactgccagccatttgacagccgtttttcgtttcataccctcagttccttcccctttgaaccacagcaattatggatgtcggcggttttctccgtcaaggcggatcggagcagccaaatataatatccgctccattaatcttgcagcttttacttcttctttttctcccctctgcgaatacgtaaaatgatgcttcagctcgtcaggtgagaaattagaagaaaagaacgttggcagctgctgggacattctgtgctgaagcaccgttccgatgacctcatcccttacccagcttgtcattgattctgctccgatgtcatcaagcattaatacgggtgtggtctttaccatattgagcttctcttccaatgtctggtcttgcagcgaattcttaagctctctcacaaattcaggcacataaacaatcatggaggaatactctttttccgccagctcattggcaattgcagcgagcataaacgtttttcctaccccaaatttcccgtataaatataatcctttcccttttcccgtctcattatagcttttcaggaagtctgtaacatgctgaaacatcgcgagtctgcttgggtcactgatatcaacttgctggaacgtcgctccaagaagatcctgctggatatacatgcttttcataagagactgttgtttcttctgctggtcgagcttccgtttgactggacattcgtaatactcgatatcaatagacctcccattgacaacaagcttcggatggtagccctccaacaaattgttgcagttttcatcttccgaacaataggagcaattcttgctttgttcgatatattcataaagcttatttaagctcttttcgatcattttttggtcaatcacttcttcgttttccttcaaaaatgcttgaacatcttgatctttcatgactttttccttcatttgttcaagacgtttttggaaatccggcctgccggttacgccctgcagggaacggccgattggttccatctattccttcaccccgcatctctgtctttaataggcagagtattttttcagtttttgcatttcttccatcatctttttcttctgttcttccaaatcctgcggatgcagcttctgctgtccggattctgaatcggacgctgtttccttttctgtcatccaatcaggaagcttttcttcacgaatcactttttggtttcgtttcgaagactttgtttttccctcagcccattcaagatactggcggttttcttctattgcgagcttcatcgcttccctgaccgttttcacctttttgcgtgcccaatgcgaagcgattttttggatatagtttttcgacagcttcatgtcggttttcagcatgacataataaattaacacatttgtgacgcctggctcgagcttctgttcgaacataatttcttctatgatcttcagatcagcttttgacggctctgttccgtcagcaatgtcctgcagaagcttcttcggggaaatcgcctccagcaatgcaatcagcttcccatccagagaatcctcttctgccggtttttcgccttcacgcagatgcaccggctgtgttttttccaccaaatcgggcagctgtccgtttctttcaatttgataccagtcgctcgccgcttttcttaatgcctccgtcgtaatgacgtcacgctcatcaattgcgctcatcacaacattttgcatttgcaaagggtcaattccgtacagataagaaagctttttgattgtgtcccgcacctgctgggtcatcgcttttctcggtatcatcgtctcagaaagtcccgctaaaaacaaatcaaaatcaaacacatcctccgttatggtgtaggacggagactgtccgacagaagtatactcggacccctcggcaagccttaccgtttcctccatatcggatgtgagcttccattcactcggctgcagcgattcaaacgcatgattaaacggacgcgtaatgtccttcgcatcttctgaaatggccgggtgcgtaaaaaattgttttaattgctgatatttcgtttttccgaccctattatacagaaaaacattcagcattccgtcttcaaaaaattcatttggtctgagcggcggaaggagttcatatataaagaggcgctcctgccgctcggattctttcatatatactttcagcaatccgatgccctcgagcttcccctgttcctgatggatcgtttttaagttggactgtgtcatcgccatcagctgtctatgtgtggactctccgccccacagacggttttgttcaagctctccccacaatgtcatataaagagagaatgcaacagggccgattaagggctggtacagttgtgtaataatttgtctgtcaatatcctgcagcatcgatctgcttttaaccacatacgggtctacaggcagtacatctttccaatagtcagccatacattctcaaaccttccgaatttgtttctacctttcattttacaccgtttcttatatctatcaaatgccaattttgcacatgagaaaagagctagaagaatcctcttagctcttttaacgctctttctttattaagtcttttaattcatcgataaagacgtttatatctttaaactgccgatagacggacgcgaaccgcacatatgcgacttcgtcaatcttagccagccggtccatgaccatttctccgacgagctcactcttcacctcggagcagccttgattgcgaagttctttttcaatatcaaagcacatgtcttcaagcgttttgagtgaaacaggccttttttcacatgcttttatgaggccgcgcagcattttttctctgctgaattcctcacgcacaccttcttttttcacaacgatgagcggggtttcctccactttctcaaaggtcgtaaaccggtagtggcaggattcgcactcgcgtcttcggcgaatcgactttccgtcatccacaggccgtgaatcaaggactcgtgttccgttatgctggcatgaaggacatttcaataaaatcagctcccaactatatcgttccctgcaatgtattttcggcagcctccgccttttaaaaatagatgtgacagcatctgtcgggagagccgttgttaaatttgtttctatagcattaggtggtttgtgaaaatctccttcttattttacaaaaaaaatgaaaaaagaaaaagctgacactctcgtttctttataaaaataaaaggagcataagctaaaaagcgcataatggctttctagcttcagctccctttgtgttcgcaatttactttatagtactttcgcttgcgcctgtttaatttgcacaggccccattcctcttggtatttcaatgttttctcttgtatcagcatgtaatgcctctgcaatgtaatcagcagcgacattaggatctaagtctccacaagtataaacatcaatgctcgcatatccgtgctcaggaaaactgtgaatcgttaagtgtgattcagaaataatcacaactccgcttacgccttgcggtgcaaatttgtgaaatgcaacctcgcgcacctcagcacctgattttagagcagcatttacaaacgttttttcaataaaatccatgtcattcagcttatcaaaatcgcatccccatagctcggagataacgtgacgccccattgtttccatagtcatggacccccttaacaagaattaaaaagtgaaattccaacaactgggtcggccatttaccacgggggaaagttagtccggagaggtcctaaccctttaagtaattccgaaacagtctcaagcaagaagttcacgaaaaatagtatactgtgtttaagtctaatttgcaaggtgcgttttttcagaaatatgctgttaagggttttttctttaaaatgtgtccatgaccttattttatacagcagacggatgtttcattcgtgccgctacatggcggattagatcaacaactctgcaggagtagccccattcgttgtcataccacgccagcacctttactttcctgtcttccattaccattgttgtaagcccgtcaatgaccgctgaatgcggattcgtattataatcagtcgaaacgagcggttcatctgagtaatcaagtacaccgtacatcgacgttttggcagcgcgtttaaatgcctcgtttacttcttcagccgtaacatccgttttcagatcaacaacgagatcaaccaatgagacgttcggaacagggacacgcaaggcgaggccgtgaagttttcctttcagatgcggcagcacaagcgaaagcgcctttgccgctcctgttgttgttggaatgatggattcaccgcaagcccgcgcccggcgcaaatctttgtgcgggttatcaatatttttttggtcattcgtatacgcatgaactgtagtcatcagaccgctctcaatgccaaactcttcatccagtacttttacaacaggcgcaaggcaatttgtcgtgcatgacgcatttgaaataatgacatggcgctcagcgtcgaattggtcctcatttacgcccatcacaatggtaacgtcttcattttttcccggagcggtcaaaatcactttttttgcacctgcttctatatggcccatcgctttatctttagcattaaacttccctgttgcttcgacgactatgtcaatatcatattcccgccaaggcagctgttttggatcacggctgtttaacaaaagcactttctttccatttacgatcaggctgtcttcaccagccacaacctctttgtcgtatctgccgtgaattgtgtcatactttattaaatgagccagcgtttctgcggaatagctggcgttaatggccactacttgaatttgatcgtctaacatcgcttttctaaaaaccattcttccgattcttccaaacccgttgatcgctacttttaccttcatgttggacaccccttatcaattatgccatcctaatttgttactatctaaaattagtataacacattaaaacaaattcgccagtacatattgataaaaatcaacgattataacgctaatttatgatgcatcttatgttttcttgcacagaatatcaggcgtaagaaccaaaaagcagccagcgctccgcactgactgccctcatgctttatgattcctgttttaacttatcattgagcacactttcttctagcacagaaaatgtatccccgtatactctgttaatatgattcgctccccaagcacacagcatatctaaaattccttctaagctgcggccgtattcgctgagctcatattccactttgggaggaacttgattatatacgattcggttaatgacaccgtccgcttccagctcgcgcagctgctgagtcagcattttttgcgtgatattgggcattaggcgttttaattcgcttgtacgtttttttccgtgcgtcagatggcataaaatgacgcatttccatttccctccaatcacttcaagagtcgcttcaacagaaatgttatattttttcttctccatacaatccattctcctcacaggcaccaaaaagtgactatagcacttcaaagtacgtacttttatttcttaacgatatgtttcataatcacatttgccggctgatttgaatctgctcttttttatttatatagcttactcggcagaatttcaatcatacaacacatcttacaaaggaggaacatcatgacttcagccaaaagcagtattcctgcactactggctttggccgtaagtgcattcgcaatagggacaactgaatttatcagtgtcggccttttgccgctcattgctgatgacctgcatattccagtcacgacagcaggattaaccgtttccctttatgcgctcggcgttacatttggggcacctatattaacttcattgacctcaagcatgtcgcgtaagacactattgctttggatcatgtttatttttattgccggtaatacgatggcagcaaccgcttcaagcatcgggattttactagcagcacgtgtgatatcggcattttcgcacggtgtgtttatgtcgatcggttcgacaatcgcagcggatattgtcccggaagataaaagggctagcgcgatttcaattatgtttactggcctcactgtggcaactgtaaccggagttccttttgggacatttatcggccagcagttcggctggcgtttcgcctttatggtcattatcgccgtcggaatcattgctttcattacaaatggtattcttgtaccgtccaaattacgaaaagggacgaaaacaacgatgcgggatcaattgaagcttgtgacaaacagccggttattgcttttatttgtcattacagcgcttggatacggaggaacattcgttgtgttcacgtatctgtctcccctgcttcaggaagtaacaggcttcaaagccgggactgttgcagtgattctgctcggatacggaatagctattgctatcggcaatatgattggcggaaagctgtcaaaccgaaatccgattgccgctttattctatatgtttatcgtacaagcaattgttctattcgtactgacatttacagccccgtatcaaacagcagggctcattaccattctctgtatgggattgctggcctttatgaacgtgcccggccttcaggtgtatgtcgtcatgctggctgagcgttttgtcccgagtgcagttgacgtcgcatccgcgatgaatatcgctgcctttaatgcaggaatcgcgcttgggtcataccttggcggtgtgatcaccgattcaatcggattgattcataccgcttggataggcggattaatggtggtcggtgcagtcattttaacaggctggagccgcttaatggaaaaacgagatcggcaggaagcctgacaattttaaaggaggaaatgaacatgacaacacatttacaagcaaaagcaacacttcataatggggtagaaatgccttggttcggcctcggcgtgttccaagtggaagaaggatctgaactggtaaacgcagttaaaactgccattgttcacgggtaccgcagtattgatactgcagctatctatggaaatgaagctggcgttggagaagggattcgggaaggcattgaagaagcaggcatttcaagagaggatctgtttatcacatcgaaagtatggaatgcggatttaggctacgaagaaacactcgccgcgtttgaaacaagcctatccaaactcggtctggattatttggatctatacctcatccactggcctgtagaaggaaagtataaagaagcttggagagcgcttgaaacgctgtataaagaaggccgtatcaaagcgattggcgtaagcaacttccaaattcaccatcttgaagatctgatgacggcagctgaaattaagcctatgattaaccaagtggaatttcacccgcgcctcacacaaaaagagttgataagatactgccaaaatcagggcatccagatggaggcttggtcacctttaatgcaggggcagctgctggatcaccctgtattggctgacatcgctcaaacatacaataaatctgtcgcacaaattattttgcgctgggatctgcagcatggcatcattacgattcctaaatcaacgaaggaacaccgcattaaagaaaatgcaagcgtatttgactttgaattaacgcaggatgacatgaaccgaatcgatgcactgaatgaaaacttgcgagtcggtcctgatccggacaactttgatttttaatggcaaaaaaacaccgttcaatatgaacggtgttttttgtattatgcccagctgttcatgatttcatcaagctgccttttggtctcttcaagcgtgccgctgttatcaatgacttgatctgctcttgctgttttttcctctaagggcatttgagagcggatacggctgactgcttcttcttccgtcagctgattgcgcttcatcagacgttccagttgaagctcttttgtcacactgaccacaataattttatcaaccaatgattccaatttgctttcgaacaatagcgggatatccaatacaacaaatgcctcccgatttgcaacggcttcatcacggcgattgagcatttcctgcctgactgcgggatgaacaattgcatttaaagcgagacgcttttgttcatttgtaaataccagcgctccaagcttttttctatctatatcgccatttgagagcagtatgtcttcaccgaattcgtcaatgatttgccggtaggccggcatccctttttctaccgcttgttttgcaatgatatctgcatctataactgttattcctttttcaatcagcatattggctaccgtgcttttgccgctagctattcctcccgttaaaccaatgactaaggtcaagagatccactcctttttacaatttccagagcccaatcgtgattaacagaagccccggcaaaaacgccattttatcgatccatttccacttagacagaaaatggccggcattggttccaattgatacaaacagcgagctcatgattgccacggcgatgctcatcacaatcggtgaaaaaccgagaatggctgcgcctatgcctgctccaaaggcatcaattgataaggcaaatcccaataagaccgcctcaattccattgatcacacccgatttgtcgatatccgcactcatgggttttctcaaaatatgaatcacaatccctaatgaccgaacctctaaattaagcagcgttttttcatgcaataggtattctttatcttttgccggtttgaagaattggtacagaacccacgcaccgattccaaccaatatcaaaccgccaagcttctccgtcacatatacaggaaaaaacttcgtgagaaagcttccgatcagcatggatataaacatgacagcaccggaacagcaggcgataaccaaaatcgctttaaacggtattttcatttttctcaatccgtacgtaaatccgactgaaaaactgtccaagctgacagccaacgccagcagcagtatagaaaccatttgcatatccgtttcttcctttctgttggtgctcttgtatcagatgtgaaatgcccgggattcatcacaatcatatatatgggaaagtgaaaaatccgtgtttcgaaaatggcatcctccattacagagttactgatatatgcaccgacagcttggacgatgaagcattatgctacttttttttctggcactttgcgcaaaaatgcgtgcctcttcctccaacgacaattttcgaaatcatcgttccgcaatttttgcatggctcgtctttttttccgtacacaaaatgctgcagctggaacattccgatttccccttgggagttgatatatgaacggactgtgcttccgcccgcatcaatcgcctcctgcagagtgtttttgatttcagcgtgaagggttttgattgttttatctgataattgatttgcttttatctcgggatgaacacccgctctgaaaagagcctcatccacataaatgtttcctagtccaactaccgttttttgatccagtagggcagttttgacagcgcggtttgttttcgcaagccgttcttttaaatacgcactcgtaaattcttctgcatccggctccggacctaactgagaaagcgggagctcgcccgcttcttctcccggtttaaataagtgcatggttccaaatttccgcacatccctgtaccggagctgggttccatccgtcatcgtgaatatgacatgcacgtgtttatcgtcaggctcctcggcttgatgaagaccgtattttccttccattcgaaggtgagaaaccataacataatgatctaaatgaaacagtaaaaactttccccgtcttccgatggactgtatcgtttctcctgctagttttcgcgcaaattcctccggttcggcaggccgtttgatgatattcggccatctgatctctaccgatttgattgtttttccctttacaagcccggtcagagtgcgccggaccgtctcaacttctggtaattccggcacatccatcacttcctatctctgtttatttcgcatcgtaccaagatgggcctgatgcaaagtccacctttaacggcacatctaatgcaagcgcatgctccatcacttcaggaacaagcttttcaagaatttcaatttcttcctttggcgcctcaaaaatcaattcatcgtgtacttgaagcagaagccttgctttcaactgtttttctttcagcttggcagccatgtcaatcatggcttttttgataatatcagcggcgcttccttgaatcggcgtattcatggccgtccgctctgcaaaacttcggatattaaagttccggctcgtcagctcagggatgtagcggcggcgatgcataagcgttgttacgtatcctttttgcttcgcttcctgtactgaatcttccatgtacgcttttacgccttggaagctttccagatagcggtcgataaatgctcccgcttccttccgggtaatgccgaggttctgtgacagaccgtaatcgctgatcccgtaaacaatgccaaagttgaccgctttcgcctggcgtctcatcgcagatgtcacttcatccttagcgacatggaacacatccattgccgttttcgtgtgaatatccatatcatttgtaaaagcttcgatcagattatcatcctttgaaatatgggcaagcacccgcagctcgatttgtgaataatcggctgcaaaaatgagccagtctttttcagacggcacaaaagcttggcgaattttccgcccttcctcaagcctgatcggaatgttttgcaggttcggatcagtcgagctgagacgaccagtttgcgttaaggcctggttaaatcgcgtgtgcactttatgcgaatccggtctcgtcacctttaaaagcccttcgatatatgttgattgaagcttgccaatttgtctgtactgtaaaatatagtcgacaatatcatgcttgtcagccagcttttcaagcacatcggcagacgtagaatagcctgttttcgttttctttacgacaggaaggccgatcttttcaaataagatgacgcctagctgtttcggagaattgatgttaaacggctctcccgcaatctcatggattttttcttcatattccttcagcttcgcacccagttcttcacccatccgttttaaacggtcaacatcgactttgacgccagttgattccatttcgccgagaataagcgcaagaggcatttccagctcttcaaacagttcaagctggtcgttgttttccagctcctgaacgagcttttcccgaaggctttgaatcgctaacgctttgcggccaaggtgctcagacagtacgtcttctgacggcactgctcgttttgctccttttccataaactgattcatcacttgaaacgatatgcaagccgtaatccttagccacactcgcaacgtcgtcatatgaattgcccgggttgatgatataagccgcaaggagcgtatcaaactcggctcctttcagctcaatgccctgccagcgcaaagcgacaacagcccgcttgctgtcgaagacccatttcttctgctcgtcattttccacccattctttaaacacctcagactcaacggcagtgtctttcggaatgaaataagctcccttttcatttacgatcgaaaatccgagaatcggctcttcatgataattatcgccaatctgttcaacgacaaatgcggatggagaaaccaatatatcgcttgtcacgtctgtgactgttttgacattaatgtcttccaacgattgatcctgttctgcttctgcactgtcttctccaagccgttcaagaagcgtgttgaagccaagatctttaaagatggcaatgacctgttcacgattaaagccttgatattccaggccggaaacagatacctcaatcggagcatccgtcataattgtcgcaagctccttgctcatcaatgcttgatccttaaactcctcaagcttttccttcaatttctttccgctcacctcgtcaatggactccagcagcttttcaacggaatcaaattgttttaaaagcttaatcgcagtcttttctccgacgccgggcacacccggaatattatctgaggaatcgcccatcagacccttcatgtcaatgatttgttcaggcgtaagcccgtatttctctttgacatgctccggtgtgtaaaattcaacatcggtaattccctttctcgtaatggcaactgtcgttttgtccgttgccagctgtgttaaatccttatctcctgagaaaaccttaacttcaaatccgtctttttcagccgatttggccagtgtgccgataatatcatccgcttcatattgttccagttcatagcggctgatctggtaggcatccagcagctcgcggataaacggcatttgttcggaaagctcaggcggggttttctgtctgccgcctttatattctttaaatgtgccgtgacgaaatgttgttttcccggcatcaaacgcaaccagcatgtgcgtcggtttttcatcctcaagcattttcatcaaaatcatcgcaaagccgtatacggcatttgtatgaacacctttatcattgcttaacagcggcaatgcaaaaaacgcccggtaagccagactgtttccgtctacaagcactaatttttttcgttccgtcattcaatttcctcctaagaagcctcaggcttccattcatctcttacatagtcattagctcctcttattttaacaaagttcaatttgaaaggaaaatacgtgaactataagagaagacacaaaaaaggacgggaacacaaataggttcccgccgtcaaaattggctccttggatgaaggggttctactacatcctaccagcataggtttaacagtgcatgaagatattgttaaacctttgtaaacattaggcggacttttcagcggcccgtttcagcgtcacggtaaagacagttccccgtccaggctcgcttgtgacatcaattttcccttcatgagcctctattaaatgcttgacaatcgcaaggcccagtccggttccgcccgaattcctgcttctgtctttatctacgcggtaaaagcgttcaaagatgcgcggaatttcttctttctgaattccgattccagaatcagcaacctcaatctgaatgtctttttctctgggctttacattgatagccacggagcccccctcaggcgtgtaggttaacgcattgtttacgagattaagaaatacctgtttcagcctgtacgggtcaccagatacatattgagggtctttcggggcattcagttgcaaggagatgcctttctcatccgccttatgcttcagaagcgtttcaatctcaccaagcattttggccggctcaaacgtttcgatactgagcgtgaaattttgctgctcgatttttgagagatcgagcaaatcctgaaccaaagactgaagcctttcgctttccttaagaataatagagagaaattcagaaagcgcctctttgtcttccatcgccccatccaataacgtctccgtaaacccttttatggacgtaatcggtgttttcagctcatgagaaacattggccacaaaatccttcctcatctgctctaatttctttgtttccgtcatgtcatggaaaacgagcacaattcctttccattcatcgtccggccccataatcggaacgccgtccacttcaaaataacgccgttctattttgatcggaagtcttaacagcttgcatttctttgtctccgtcataaaaatgtcttcgacaagctggatcacttcttcatgttcaaatgcatcgtgataaagacggcgcagcatatgattcggattgatatgaaactgcttggcgtaagatctgtttacgagattaataaagcctcttccgtcgatcataatcagcccggagccaatgttttcaatgactgtcagcagccgatcccgctgcatttcctgcgttcgcgtcatttccatcagatcaatggcaaggctgttcatcgcatgtcctagcttatcagaacgcctaatatagccgccgtacgtccgtgcatcgtagttgcccttagagagttctgtggctacatttgtcgctgactcaattgaccttttataacgtgaggtcatgctggaataaaaataaacaatgacgataaatgcggtacaaagactggccgtcagcatcccccacaattcgccttttaagccgtcgcttttttcagaggcggaaagcagcacatatcctgttttttccccttcgcttctaagtgaaagtccgtaataaagcttgttatctgttgttgacagaataccctcatggccagaaacaagcgcctgcaccttttgggaatcagccgctctcccgttagacccatacagcaccttgccgtctgtatcgataacggatgcgctcacatcaagcgcgccgcctgcatctttaatgattttctcatttgtttgattattcagattgccggcatcaagaagcgaagccaagtattttgcttctttttcaatgtgttcctctgctttcctttgatcagatgtttcaaaaagctgctgtaaaaacagcccgagaacacaaaacaccagaatcatacagacaacgaatacagaaaaaaggcgcacacggtatttattcattcatttttggctcctccagtttataccccaatcccctaatcgttttaatgtagatcggttttttggtattgttttcaattttgtcgcgaagatggctgatgtgcacatcaacaattctcgtatctccggcaaaatcataattccagactgcgctcagcagcagatctcttgtcagaactctgcctttatgtctgcctaaatagagcagcagttcgaattctttcggtgttagttcaagctgactttctttaaagtacgcttcataatgatcaggcaggattttcagatcgccgattacgatctggccttccatttcatcgttcttcatctcactagagggcgcagctatttccgaacgccttaaaatcgctttgactctcgcatttacttctcttggactgaacggcttggtcatataatcatcagcaccgagctcaagccctaatactttgtcgaattcctcatccttcgctgtcagcattaaaatgggaaacatcagtttttgctgtctcagctgcttgcatacttcgattccgtccaattttggaagcatcacatcaagcacaatcaaatcaggcttctctgtttccgcttttttgagtgcttcttccccatccgaggcggtaatgacatcatagcctgaccgttccaaattgtactgtaaaagagtaacaatagattcttcatcatccacaactaaaattttcttgttcatgctgtgcctccagtattataattccccgacatcctatttctctattttatgtcatcttaacatgtttcatgattttattttagcgaaagcaggacattccgacaattcgccttttacatcatttttaaaagaaataaagacgtttatgataacgctttcatttatagtaaaaagagaaaggctgtattaagcaagcctttctctctttttattaggataatactttcatgacatttttgacagattcaactgatttattcagctgcgctctttcatagtctgtcagttcaagttcaatgatttgctcaagaccgttgccgcctacaattgtaggaacaccaaggtagatgccttcatagccgtattccccttcaagataagcaattgtaggaaggacgcggcgctgatccttcaagatcgcttcgaccatttctgtcagagaagccgcaggcgcataatacgcgcttccgtttccaagaagattcacgatttcgcctccgccttttctagtgcgctccacaattgcgtcaatccgttctttcggaataagagtttcaagcgggataccgccagcataagaataacgcacaagcggcaccatatcgtcaccgtgtccgccgagtacgaaaccagtcacatctttcactgacaggtttaattcctctgccacaaatgttctgaatcttgccgtatcaagcacaccggactggccgattacacgctctttagggaagcctgattctttgtacaccgcgtatgtcattgcatcaacaggatttgtcagcaccacaataatagagtcaggagaatatttcacgatttcccgcgtaacgcttctcataatcttttcgtttgtagagaccagatcatctctgctcataccaggttttcttgcgataccggctgtaatgacaacaatgtcagagccggctgtatcctcgtaattggatgttcccgtaatttttgcgtcaaagccttgaaccgggcttgcttcaagcatatcaagcgcttttccctttgtcgggttctccaattgcggaatgtcaacaagaacaacgtctgccagctctttttgagcgattaaaaatgcagttgtagctccggtaaaacctgctccgataacagaaacttttttacgagtatttcccatgtctctcttctcctttatggctagttttaggctttttccttgcttagtccatgtttttgatcagttcttctccgaactctgaacatttcacttcagtcgcgccatccattaatctagcaaaatcgtaagttacgactttggaagcgattgttttttccatagatttgataaccaaatcagccgcttcgttccatcctaaatgctcaagaagcagaacgcctgaaagaataactgaagatgggtttactttatcaaggcctgcatatttaggagccgttccgtgcgtcgcctcgaaaatcgcatgtcctgtttcgtagttgatgttcgctccaggagcaatgccgattccgccgacttgcgcagcaagagcatcagaaatgtaatctccgttcaagttcattgtcgcaacgacatcaaactcgtttggacgcgttaagatctgctgaaggaaaatgtcagcaatgctgtctttgataatgatttttcctgctgcttccgcttcgctttgcgctttgttggcagcgtcttttccttcttcttcagcaatgcggtcatattgagcccatgtgaagactttatctccgtattctttttcagcaagttcatagccccagtttttgaaggcgccttctgtgaacttcatgatgtttcctttgtgaacaagtgttacagatttgcggccatgctcgatcgcataatcaatggcagctctgaccaagcggcttgttccttcttctgaaacaggcttaatgccgatacctgatgtctcagggaaacggattttattgacgtttaactcattttgaaggaagctgataagcttttgcacttcttcagagccttttgcatactcgatgcctgcgtaaatatcttctgtattttcacggaagatgaccatatcagtatcttcagggcgttttaccggtgacggcactccagtaaagtatcttacaggtcttaagcagacgaataggtcaagctcttgtctgagcgctacgttcaaagaacggataccgccgccgacaggtgtcgttaacgggcctttaatcgcgatgaaatattcgcggatcacatctaatgtttcagcagggagccactcacctgttttattataagccttttctccggcgtaaacttctttccatgtaattttcttttcgcctttgtatgctttttctactgctgcttccaaaaccttcgaagccgcgttccaaatatcaggaccggttccgtctccttcgataaatgggataatcgggttgtttggtacgtttaatactccgttagagactgtaattttttcaccttgtgccacaataaaaacctcccagtatgtaattcatatttagaaaacattttatttttcttatatagaaaataaaatgatttttcctaacattcaatttaaagtgtaacccaattttgatgttctgaacaagaggctaacctcattgacgcaagccagcctccaatggttctttaggctctttcttcaatcggaacgaatttttgtttgtcagggcctgtgtaatctgcccgcgggcggatcagacggttgttgtcatactgctcaagaatatgagcgagccagccggacattctgcttacagcaaaaatcggtgtaaacaaatcatggtcaataccgaggctgtgatatacagaagccgaatagaaatcaacgttaggcggaagctttttctctgatgtgacgatgtcttctatacgaatcgacatctcataccatttgctttcgcctgtcaggttggtcaggcgcttgctcatttctttcagatgcttcgcgcgcggatcaccatgcttatacacacggtggccgaatcccatgattttttctttcttttcaagtttagcgcggatgtacggctcagcgttttccacttcaccgatttctgtcagcattttcataacgccttcattcgctccgccgtgaagaggccctttcagcgcgccgattgctgcagtaatgcctgaatagatgtcagaaagtgttgcgacgcagaccctcgctgtgaacgttgacgcgttcagctcatggtcagcatgtaaaatcaatgctttgttgaaggcttcaacttcaattggtgaaggctcttcaccgtttaatgtgtaaagaaaattctccgcaataccgtaatcttctctcggttcaacaggctcaagacccttgcgaattctggaaaacgctgcaaccaggccaggcacctttgcctgaaggcggatcgcctttctgtagttggcttccgggttcatggtatcagcctcgctgtcaagcaggcctagtaatgaaattgctgtccgaagagcagccatgggatgaacattttcgagggaataagatttgaagtgctcaataatttcttgcggaacggcagcttcctttgcaagctgctgctttaactcttcaagctcttttttgtttggcagccttagatgccaaagcaagtagatgatttcttcaaaacttgcattctctgtcaaatcatcgatatcataccccacatatgtaagggtatcatcaataatagaactaacagatgatgttgttgctacaaccccttcaagaccgcgtgtcgctgtcatatataacatctccttttcaataaatttcccctttaagagtgttgtaaaaacatgaggcttacttaaaaagcacgatgcaagtatttctctcccccaaaaagaaaatgcttacattttactggctgctggaactaaaaccctttgcttatgaaagaacataacaaattcttataagcttatttaagtttaagcctattctcattataaacaataatcagacatttgttaaatgtttacctataattttttttttcattctgtgatttccccgaaaaaacgcctttatttgcgggtttttgcataaaaaaaaagcggctttaaggccgcttttttttatgaagtgaacagttttacgatctgcatggctaaataagcaatccccgctccgatcagcggccccaccgcaactcctccaaaaagcgcgactgcaagaatggtcccgatcacgagagcagttgtaatatgcggatcattttcaagcagggccaggccgttttttgcaatcagcgccactgcgatccccgctccaagggcgatccatgcgtaggaagaccgcattgcttctccaagctgcttaaatccgatttctcccgtggcaatcgggacaagaacggcgatggtaataatggtcacaccccagttaatgccttttgactggatggtcggaaataatttctgatcaagcccaacgattttgatgatcaaaaggacggatacagcaaagagcaatgattggttttttgcgataagtgcgatagccaagagtaaaattaaaaataaattcgcttgtgtaaacacatgccatccctcctttaagatgaatgtattcatattcagccgcagcgtgaatacatataaaaaataggacatgctgacgagaggaggaccgttttcgtgaatcaatcttatatcactatttttttcagaaccctctttgtcatatcaatgaccgcagggtcgatagctgcggcctattattcgtttccgttaacttatccgttcctgatcgcccttattctttcttcagtgattcatcctgttgtcgattatttggacaaagtgacaggattcccccgaacgataaatgttctgggcgttcttgctttttttctgctcgcagccttcggcgtcctcaccattctggtagccgaaatcgtaacgggaacagcctatctagcaaaaacgctgcctccgcatatcagcacgtttatttcatattgcgaaaaattgtttaccactcatattcagccgctctataacgagttaactcttttgtttcaagaattggaaacgaaccagcaggcttccatcgtcactcatatccagacactcggtgattctgccgctaaaaatgccgggctcctgctgtcccacattctagagatgatcccgagatttttcgctcttcttcccaatacggcggcggttctgattttttctcttctggcaaccttttttatgacaaaggattggcataagctgaaagccatgcttgttttaattctgccggatcgtgtgacagctaacagcaaagcaatcagcagcgaattaaaaaaagcaatgactggttttatcaaagcacaagccgtcctcgttttcatcacgatggtgattgtatttatcggcctttctctcttaaaggttgaacacgccgcaacaattgcttttttaatcgggcttgtagatcttctcccttacttaggtgccggctccgtatttgtgccctggattttgtatttatcgattacgggccagctgccccaagcaatcggaattggtatcctgtacctcgtcgttcttattcagcggcagctgacagagcccaagatactaagtaaatctatcgggatcgatccgctggcaacactcatcgccctgtttgccggctttaaattattcgggtttttaggactgattgcgggaccggctgtactcgtcatcatccaagctttcatcacaacaggcgcattaaaagaaatatggtcctatatcaccgttcagcaaaaataaaacggcagccgttttttcatggctgccgttttttatttgatgatgatccgcttattcttcgacattcctctcagccatttgaacagaatcggcttacaccagccgcgggtaaacgggataagaagacaggcgccggccaaatctgataaaaagcccggaagcatcagcaatagaccgccaatgaaaatgcacagaccgtcagcaatcgcttctcccggcattttgccatattgaagatcacgctgaaccttataatacacttcggttccttgtttttttgcagctgctgcgccgataatgccagtcagaatcatgaatagaactgtcggcaaaataccaatcagctttcctaaaaataggaatataccgatttctattgccggaaacacaataaaaagcaaaaacaaaaatctcatatccaagccccccacacgtgtaacacgttctgttcaacaaaaggcatgataaagagaaaaggaagggattccccttccattttcacctgtaattaaagaacgctcgcacggccttgatagactgcgcctctggaagcgtcaactgtaatatcctggccatctgtcaaaatagatgtcgcattttccagacccacgataaccgggatgccaaggcttaatccgactaccgcagcatggctagtcaaaccgccttcttctgtaataagagcagacgctttttcaagggatgcaatcatatcacggtcagtgcttttggtaacaagtaccgcaccgtcagtcattttttgctcagcttcttttgcattttgtgcaacgacaaccggaccgtaagctgatttgcgtccaatgccttggcctttagcgatgatatcgccgacagtatgaaccttcattaagttcgtagtgccggactcaccgacagtgccagctgtaataacgataagatcgccgtgttttacaattccgctgttcaatgatttttggacagcatcctcaagcatctcatctgttgagctcgcattttggccgctttccgcgaatacgccagatacgagggcaagctttctggaaatagagtcatttacagtaaccgcaacaatcggagcctgcggacggtattttgcaatcatacgtgctgtatggccgctttctgtcggcgttacgatcgcagcagcattcaggttaatcgcagtatgtgcgacagattgtccaattgcgtctgtaattgtcatgcccacttggtctctgcgttttgagagaatttctttataatttaatgcttcttcagaacgggacgcgatgttatgcattgtttgaactgcttcaaccgggtaacttccggcagcagtttcaccagaaagcatgatcgcatctgttccgtcgaagatcgcgtttgcaacgtcacttgcttccgcacgagtcggacgcgggttgcgctgcatgctgtcaagcatttgtgtcgctgtaataacaggtttgcccagcgcgttgcattttttgatcagttctttttgcacaagcggcacttcttcagctggaatttccacacctaagtctccgcgcgcaaccattaagccgtcagacacttcgagaatcgcatcgatgttgtcaacgccctcttggttttcgattttagggatgatttgaatatcctgagcgttgtgctcttcaagaagctcacggatttcgagcacatccgtagaacgtcgaatgaaagatggtgcgatgaagtctactccttgctcaataccgaaaacgatgtctcgcgcatccttttcagtaatacccggaagattgacacttacgcccggtacgttaacaccttttttatttttgagtgttccgttgtttaatacttttgttttgatttcgcgtttagcggcatctacatcaagtacctcaagaccgataaggccgtcatctaacagaatcgttgaaccttgttcaacgtcatggactaaaccttcatatgtcactgaaattttatctgttgttcctacaacctcgtccattgaaataatgagctctttgcctgtttcaagctcaataccgccgttttccattgtatgtgtgcggatttcaggaccttttgtatcaagcagaattccaacgttcttgccaagttttttacttgcttcgcggatatttttaattcttgcaccgtgctcctcaaaatctccgtgagaaaagtttaatcgagccacgttcattcctgactccattaatttcgtaagcatttcaatactttcacttgccggaccgatggtacaaacaattttagtttttctcatttggttcacttccttctgaaatcttcagccttcatctgcacattagatagacagttcttttgaaagctgatacatgttttgctcaactgtgtgttttgtctcaagtatttctataatatcatggtctacaagcttattgttttgtatacctacacagcgtccgccttttccttcaagcagcagttcaactgcatatgcgccgagacggcttgccaacacacggtcagcagcactcggagaacctccgcgctggatatggcccaatacagataccctagtttcaagatttgtttcttcttcaatgcgtttcccgaattcaacaccgctgcctacaccttcggcaacaataataatactgtgcttcttgccgcgttcgtggccgcgttttaagcgggcaatgatttcgtgcatgtcatagtctgcctcagggattaagatcgattccgcgccccctgcaagaccggcccacaatgcgatatcgccggcatgacggcccattacttcgattacatatgtacgttcatgagaagtcgctgtatcgcgaatcttatcaattgcgtcaattactgtatttaaagctgtatcgaaaccgattgtaaaatcagtgcccggaatgtcattatcaattgtacccggtacacctacacatggaaacccgtgttccgttaattttttcgcacccatataggaaccgtctccgccgataacaacaaggccttcaataccaagcttcttcaagtttgctatccctttttcacggccttcaactgttttgaattcaggacatctcgccgtataaagcttagtccctccacgatgtataatatcgcctactgatccgagttcaagcttttcaatctttccgctgatcaatcccgcgtatccgttgtaaataccgtaaacttcaacgtcatgatagatcgcttttctgactactgcgcgaactgctgcgttcattcccggggaatccccgccgctcgttaatacccctatacgtttcattctccattcacctcagcaacatatatgattaaacataacatgatcattgccctaaaaacaatgaaaagggatctccatcctccctatgaaaccttacctattatacaattaaataaattgtttttaaataaaatttaaggaatgtcacaaaaaataaacgtgagccaaaggcttcacgtttatttagtttaccccgatatattgatcttcaaccgagactttgccaattgctttatatttttcatagcgctgctgaactaattcttcttcgctcagcttcagcaaagtttttaacgattgtttaagggtttcgtccatatagcttgcctgcagcttcacatcatggtgcgctccgccttttacttctttaatcatatgatctataatacctaattcttttaaatccggcgcagtgattttcattgtttctgctgcttttttagcaagactggagtccttccataaaagtgccgcggcaccttccggagaaataacagaataagtagagttttccagcatatgcaaatgattgcctacacccagaccaagggctccgccgcttccgccttcaccgatgacgatacagataacaggcactcgaaggccggccatctcaaacaggtttttggcaatagcttcactttgtcctctttcttcagctgctcgtccagggtatgcccccttcgtatcaataaaacagataattggtctgttaaatttgtcagcctgtttcatcagacgaagcgcttttctgtagccttcaggatgcggcatcccaaaattgcggactaggttttccttcgtgtctttgccgcgctgatgcccgattaccgttacagggaggccgtggaacttcgcaatcccgccgacaatggcttcatcgtccccgtacgctctgtctccgtgacattcaaaaaagtcggtaaacaggtgttcgatataatcaagagttgtcggacggtccgccagacgcgcgatttgaacccggtcccatggcttcagatttttgtaaatatcatcctgaagcttagcgagacggtcttcgagccgttcgatttccgcacttagatccatatcggaatcttgggtgaatttttttagttcggcgattttggtttgcagttcaatcaccggtttttcaaattctaatcttggagccactcaatgtcacctcctgtttgatgcatatccagcagattttctaacgtttttttcatatcgtcacgatgaataaccgcatcaagctgtccatgttttaataaaaattcagccgtttggaagtcctcaggcagtttttctcctattgtctgttcaataatccgtcttccggcaaaaccgatcagcgcgccaggctcagcgaaattgtaatcgccaagggatgcaaagcttgctgatacgcccccggtagtcggatgcgtcattactgaaataataagaccctgttcttcactgaacagttttaacgcagagcttgtcttagccatctgcatcaaacttaatacgccttcctgcattctagcgccgcctgaagccgtaaaaataataaacggaactttatcagcttttgctttttcaatcgcaagcgtgattttttcaccgacgactgaacccatgctgcccattctgaatgaagagtccatgacggcgactacagccgggtgtccgccgatggtgcccttgcctgtcacaacagcctcgtttaaggatgttttctcgcgatctttttcaagcttttccagatatcccgggaaaccaagcggattttccgagagcattccctgattgaattcctcaaaggatttttcatccatcaagctttcgatacgctgttttgcgttcattgggaaatgataatcgcagttcatgcatacccgcatatttttatccaactctttagtgagcatgatttttttacacttaggacattttgtcataatgccttccggaacatcgtgcttcgcttgatcagatggtacggaagcatactttttctttttcgtgaatatatcctttaacaaatgattacctcccttttgtgaagggttctcttcaccgcatgtcatcaaacagatagacttgctaataactttaccgaaactattgtactttttttgtcaaacgctgtcatcctcaattcgacaactttttattcgatgacgtgctcggaaaggcttgtatgaaatcagataaggtgttgaaacgacaaggttgacagcgcattcaaaaataatgttaaacccggctgaaatttttttaaggctaaccccctaaaaaaatttcagccgtcagtttaacttgagaacagcgcgccggtctccgccaacgcgctgccatttttggaatgaattaaaattattcaccaataatcgtaagttttcttgttttttctgcgacttcctcagggtcaacagtgattcttgcaacacctgtttccatcgcagcttttgccacagccttcgcaacagcaggcgcaacacgtttatcaaacggtgcagggatgacataatctgcgctaagctcatcttctgaaaccagtgaagcaatggcttcaaccgctgcgattttcatttcctcgttaatatgagtggcacgcacatcaagtgctccgcggaaaataccagggaatgcaagaacattgtttacttggttcgggaagtcagaacggccagttccgataacgcttgctccggcttcacgcgcatcttccggcatgatttccggatttggatttgccattgcaaagataatcggatcttttgccatgctttgaaccatttcttttgttaacgcgcctgctacagagacaccgataaatacgtcagcatcaacgatgacatctttcagagaaccgtctttgcgatcttggttcgtgaacttcgccacttcatttttgacatcgttcatgccgttcgggcgcccttcataaatggcccctttggaatcgcacatcacaatgtcgcgaacgccataatgatgaagaagcttgataatcgcaatgccagccgcacccgcgccgtttgcgacaactttaatggatgacatggattttccagacagtttcagcgcgttcacaagacctgctacggttacaatggcagtaccgtgctgatcatcatggaaaaccgggatgtttgtttcttttttgaggcgctcttcaatgataaagcagtttggcgctgcaatatcttcaaggttgacgccgccaaatgtcggttccagcaattttacagtttcaacgattttatcaacatcgtttgtgtttaaagcaatcgggaacgcatctacgcccgcaaagcttttgaaaagaactgctttcccttccataacaggaagcgccgcttcagggccgatgtttccaaggccaagcacagctgtaccgtcagttacaactgctaccatgttccccttcattgtataatcatatactttgttaatgtcttcatgaatatccttacacggttctgcaacacccggagaatacgcgaggcttaaatctttcgcatttctgacctctacttttgatttagactccagtttcccctggttgactttatgcaggtgtaatgcttcttctcttaatgacattctcctaaacactccttatggatattttttgattcgtatactgctgcgttgattgctgcattctgcggagtaaatctatctgaatatttaaacaggatcacataattgctccaattgtataacaaaaagcgaatcgttaccactgttttaaaacgacgtttttttgacccaacagctcttttaagcgatataacacctggtgatctgcattgatatggaacgactcaggtagcttaatcgtctgtttttgcctttcataatagagataaacgcctgtttcccctttatgctccagcaaaatgcgcttaatctttgccaggatctcctggctgtgctgactgctttctatttttatataaaccgatggcgctttttctgcatccatatcttctaataattctgcccgggacatgatgaattggatcttatcttgtctaacttcacatttccccgcagtgaacaaaagagcgccttctcttaaaacgggagaaagctgtctgaattgttcagggaagactacggcttctatctcgccggtttcatcactgagcgttaaaaacgccatgttttgacctgttttcgtccgaatcgttttgatcttcgacagcagaacgcctagtgaaagctgccttttgactgcccgctgagcctgcagaatagagactgctccttgcgcagtgagctgttttcggaaggcggagaggggatgatttgaaaaataaatgccaagcgtttccttttcaaacgcaagtaaatccaccagaggaagctcctccgtctccacatacttcggcttaattgaaaacgattcatctaaaaacaatcccatttggtcatcgtccgcggcgaatagctcagcatgttccaaagcaacatcaatggatgcgagcagcgtggcccggttttggccgaattcgtccatcgcaccagaaaagataagtgcttcaagcattttgcgatttacgctttttgacggcacgcgaaagcagaaatcgaaaagatcttcaaatggtttctcttttcttgctttatatatatctttgactgctgagacgcctacactttttatcgcgcggaggctgtatctgacagatccgttttcaactgtaaacggaaaactgcttttattcactgacggaggaaggatacgaatcccgctcccctttgcttcgtaaagatattgagagattttatcctcattgccaatgacgcttgtcagcaatccgcacataaaatataacggataatgagctttcaaatacgcaagctggcacccgatcatgctgtatgccaccgcatggcttctgttaaagccatagtttgcgaatttgacgattaaatcgtagacctcatttgcagtgtctacagaatactccttttttaagcacccttcaacaaaatggcttcgctctctgtccaggatttcttttttctttttgctgaccgcccttctcaataggtccgcttcgcctaaagaaaaccccgccatacgggaagcaatcatcataatttgttcctgatacacaatgacgccatatgtatcttccaaaatgctccttaaatcttcatgaggatagtgaacaggcgcccggccgtgtttacggtcgataaataacggaatattttccatcggacccggccggtacagtgcattgaccgccacaatatcttctaggcccgaaggtttcagccgtttcaagacgcttctcatccctgcagattcaagctggaaaatgcctgtcgtatccccttttgacagcaaggagaacgttttgtcatcgctgtaggaaatacttgaaaggtctattttaatattttcttctttttcaatcattgaagtgatggattcaataagtgtcagattcctcaaacctaagaaatccatttttaaaaggcccaagtcttcaagatggtccatcgcgtattgcgttaaatagatcccttcatgcccttcttgaagcggaacaacatctgttaacggttcttcactcaggacaacgcccgctgcgtgggttgatgcatgccttggcagcccttctattttccgggcaattgaatagacttgctgaagcaggcttgactcccgaagccgcttatccagctgcggtgactgctgtctcgcttcatccagcgtcattcccggtcttgaaggaatgagttttgcaagctgatctgcctccttcgggctgacgccgaatactctgccgacgtcccggagcgccgcctttgccgcaagtgttccaaaggtgataatctgtgcgacgtgcattgcaccgtatttctgctgaacatattgaatgacttcatcccttctagtatcgggaaagtcaatatcaatatccggcatgctgacgcgttcgggatttaaaaatctttcaaacagaaggtgatgcttaatcgggtcaacatctgtgatatacagcacgtatgccacaagagaacccgccgcagaaccccttcccggtcctgtaacaatccctttttcatgggcgtgcttcataaaatcccacacgatcagaaagtaatcgctgaacttcatccgcttgatgacatcaagctcatattgaagacggcgaaggtatcgttcatcaggcttgccgaaacggctgcggagtccctccatacagatatccgttaaataatcatcagcggacgttccgtctggggtcggaaaagacggtagacgggtctgcccgagactgacgtcaatgcggcattgttccgcgatctctacagaagcttgcagtgcctcgggatgctctcgataaatgttttgcatttcttcgtgtggtttcaaatcgagatcaggcaaatcttcagcgggtgcatccgtcagtttttcccccgctttaatcgctttcaaacaacggtaggcagccttatcttccttccttatgtaatgcacatcgcctgtggccgtaacagggatacccgtttcttctgacagctttagaatctgctcagacaagacttgattccctttaaaaggctgataggagaaataaaaagctccctttccgaatatagactgaaattccagcgaggcttgagcagcctgttcgaacagtcctccttcaagaagcgtttcaatatatcctttttcgccgggcgttattgcgataatcccttctcgataactgtgaagccatttcggcttcagtccgccttttgatttagattgcagaacgctgctgattttcagcaggttttgatagcctgtatttgattttgccagcaggacgagcgggtatgcttcaagttcgctgtcatctgtaaaaacagaagccgtcaaaccgattattgggttgatccctctcgtcttgcaagctttgtaaaattgaatagctccgtacatgacatgatcatctgtcagcgccaaagacgcatatccgagcctgtcagcttcactgacgagctcttccacagccgcggcgctgtttagcaggctatacccgctatgcacttgcaggtgaacaaaagacatgctatcacctctttctcattacgattcatttcttccctcattataaggccggtttccaaaagaaacaaatgttcttttttgactcatcatcatacttgtcctgaaagctcaatatgatataaaaggtgaggtgataaagatggatcaggaagcaggatttatggtgaattttatcaatagctacttcattgcgttaggggtgctgatcgggggcgcactcattggagggctcggagcatatttggcaggcgaacccccgcttacagccattacaaagcttgccaaccggttaaaaatatgggcgcttgtcgcagctatcggaggcacctttgatgcggtatacagctttgaacgcggcatactcgaaggcaatacgagagatatctttaaacagcttcttttaattatttcggccatggggggcgcgcaaagcggctggcttattatatcatggctgacccaggagcatctttcttcatgagggtcccccagcattacaaaaaaccgggatggcagcgttttttcgcgggaatgatgtgcggagccgtaatcagctggttctttttcctgtttacttacggaacattccaagaggagcaggtcagcctcatcgaaaagcaaaaagagcatgtaaaagacttgaacaatcaaatttcgatctatcaggaagacctccataaactgaatgaagataataaaagaaaactgctgattcaaagcgtcagcgtcaaattgctgaatggggataaatataaaatatcacagccggataaaacgaaattcgaggagcatgtaaaggatgatatttcagaggtgattacaaaagacatagagagcgtctatcaaacaaaggatctcttgaagcggacaattgaaaataaagtctatatgatcaatgaaaaaaaatacgaggcaaccgtcagagaattgattatttatacgaggctgacagtggaacttgaaatatctttcgccacataattatggatttttttcaaattctccaaacttctgtcgctttttcccattcttttttataaactatatgtgaggcttaatggcgaaaggaaggaggaagggaaatggaggtttacagtgaccgtcagttagcaaaagatcaagcagcccgtctcagacaaggtttttctgcatatgccgaaacaaactcactcgcttccctcatcaaaaaagaacttcaatcacacaatctccaagtctacgaggaccttactgatttcggctgctggttcatccccgtcacagatgaacactaagagagagggtctcccctctactcgtgttctttacataatgtttccagatcagctaaaatccgatcagcttcatcccagctgtaaatagaggcgcctgaagctaacggatgccctccgccgttatatttccgggcaagtccgttaatgacaggccccttcgaacggaatctgactctgatttgatcgtcttcttctacgaaaaacacccaggcgcgaatacctgagatattgccaagcgtcccgacaagctgtgacgcttcagaagccgttgtgccgaatttttcaagcgtatcctttttgatgaaaacagaagcggccccgttttcggacaaagacacattttgaaagataaagccgttaagcttcaccacattcagttttgtttcatacaattgattaaacaactctgaggaagagaatggatactgaatgagctcgcctgcatattttaatgttttttccgtggtattcggaaataaaaagcgtccggtatctccaacaatgccggcgtagatcagctctgccgctttcgtattcagcttccagccgtgctcttttccttctaaatacagctcgtaaatcatttcacttactgagctggcgcttgtatcgacccagagaaggtcaccgtatggatcttcgttcggatggtggtcgattttcattagtttggcgcctgaaggataacgctgatcgtctattctttcctgatttgccgtatcgcagacaatgacaagtgcgccttcatatgtttcattgtccacctcatcaagggaatataagaaagagagggacggttcaggcgtgccgaccgcaaaaatatttttttcaggatatgtttcacgcaggatttccgtaagcccgcactgtgatccgtaggcatccggatcaggacgcacatgtctatgtaagataatcgtgtcatataatgatatggttctgatcaattctgttttcatttgatactcctttattgtttttattcattaaatcacattctctgccgacggaaaagaaaaataacgtcaaaaccaagcccgtttttgtataaaatgggtttgtaaacttttacgatggaggatttcatttatgctggttcttgtttttttgattgggctttccgcctgcttttatgtgtactataaagtaaaaggcgtacgggcaaagccatctttggcaaaagaaatatgttcagcaaaatcaagcatggccttagggtcactagtcctgttctacgggctcaaccaaatgatattattccattcagtattaacgttaataatcggcggtatctttatcgtcataggagcaggaagcgcttgggcaggttataaagcctttaggcattacaatccccttcacgccaaagaagctgaaagagatcacgcgtaaggggcgcctgaacgtcccttagcttctttccatcagctgaaccatcagcatcgctttagacacgatatgaccttggctgtgcacttccacttccattttcccgaactttctgccagcctccaagatgcgaggtttgacttcgatgactgattccatctgcacaggcttcaaaaagaagatggtgatgctctctatgacgagttcgccgcgttttttcgagcgcaaaaatcggtttgccgcttgcgtcaaaatggtcgtaaatacgccataagaaatggttccaagctgatttgtcatttgcggcgtgacttcatactcgtaaaccgtttgatcttctttatcatcaccctcatctttaaacccccttgaaacgatatcatcaagcttctccccgacctgcggctgcttttgaatcatttgaagagctttcaatacgtcttggcggctgatcatgccgatgagtttttggtggccgtcagtgacgggaagcacttcgatcccttcccataccatcatttgcgcagctgaagcgacagatgttttcccaataaccgtgacgggatttttggtcataactttttctatagatgcatttcggtcatggccagcaatatcttttgatgtcagaatgccatggattttcatttgatcgtcgacaaccgggaagcggccgtgccccgtttcaaaatttttctcataccatttttcaagtttatccttaggcgaaagatataccgtgcggtcagcaggtgttaggatgtcctccaccaaaacaatttcttttttgatcagctggtcatatattgcccggttaatcatcgcggcaactgtaaaggtgtcatagctcgtggataaaatcggcagttcaagctcatctgccagctgcacaatgctgtcatccgtgttaaagcccccggtcaccaatacggccgcgcccgcttcaagcgcctgcctgtgtgcattgattctgtttccgacaatcaaaagattccccgctgcggtgtaacgcatcatcgcgtcaagctccatcgcgccgatgacgaatttattcaatgtcttatggagccctgccctgcctccgagcacttgtccgtctataacatttacaacctctgcataggtaagcttttcaatgttctcttttttcttttgttcaattctgattgtgcccacacgttcaatcgtgctgacaaaccctttattctctgcttccttgatcgctctgtacgcggttccttcgcttactttcatttcctttgcaattcttcggacagaaattttttcaccgacaggcagtgaatcgatatacgttaaaatttgttcatgcttcgttgccaagcctttcacctctaaggacagtcttcttgtttttattataaggtttcaaaggatttatacgcaatgaggctggaaaataaaaaagaagcccgaccggcttcttacagcgttgatttcgtcccagtcaagcgcaaggaccccgtggctccttttacatcgtaaagcggaaaaacctttatttttcttttaaatggacatcaaccgctgtcttaacaatatttcgattccctattttagataaaacaaataaaactgcaaatagccatatcgcccctatggccgtatagatcaatggataaacagctttgtttgcgatccattcatttattaatgttctggcatttaccagaataataaatcctcctacaagcacacccatcaattgcggatgaaacttctgcaccagccatgctgcgataggggcagcgataattccgccggccattagtgaaaacacccataaccaattgacgtcctcccatcctaatgaaataagaaaaccggcggttgcagatacggcgatggcaaattcacttgtgtctacagtcccgacaactttcctcgggctcaagcctttgcgggataataaaatcggagtggtcaccggtccccagccgcctccgcctgtggcatctgcaaaaccagcgatcactcccaatgggatggattgttttcggtttaacggcacatgcttcttctcaagagccggcttatattgaaataaaaacctgatcaatacatatccgcccagaaggagcaaaaacaaagaaatatagggtttcgccacatctccaggtaattggctgaggaatgccgcgcctaaaaaagcgcctatagagccgggaatgacaagctgataaacggtttgtttgtcaacattgccaaatttaatatgcgacactcccgatgcggcagtcgttacgacttccgctaaatggacagaagccgaagccacagcaggtgtgatgccaaacgccaataacaaagaagttgaggtaaccccataagccatacctaacgaaccgtctattaactgcgacaataaaccaataaatgcaaaaacgattaatttcttcatcagaacaccccatctatatcaatcagatatttttgactcttcattcgaatctaacaatctcttggcgctttcatataaaaaataagaggctttgataatggcagtttcatcaattgtaaatgcagggtggtgccaatcatgatcaccgtctgttccaaaaaacgcaaaggatcccggaatatgctcaagataataagcaaaatcttcccccgcggttgatgggtcgggatcaatgacttgaagtttcgctttatgcgcagcgtctcgcaccagccccgtaattgcctcatcattacaaagcggcggcggtccggaatgccacttcacatttgcctttaacgagaatgcggcagaaatctgctctgcgactgccaaaaaacgctgtttcacttgatcacgaacctctgaatcaaatgtacgaacagtgccctcaatgacaactgtatccggaatgacattccaagtgctgccgccgttgattttccctacggttaaaatcgcgctttgcagcgggtttacatttctgcttacaatcgtttgcagggcgacaataagctgagaggcgccgacaattggatcaaaaccattatgcggcaatgctgcatgagcacctttcccttctatctttactttaaatcggtcaacagcagccataagcgggcctgtttttaaccctacagtcccaaccgcgatatccggtttattgtgaagtccaataaccgcatcaatgccatccagttggccgtcctctatcacttttgcagcgcctgcacccgcttcctctgccggctgaaataataaacgaacctttcctttcagactgtcttgattttccttcaataaaaagaccgcaccaagaagcgctgccgtatgaaaatcatgaccgcacgcatgcatgatccctttatgtttagacgcataaggcaatcctgttttttcttcaattggcaaggcgtcaatatcagccctcaaagcaatcgccggaccttctgactcccctgctatgtctgcgaacacacccgtttttagagcagtagggcgaatctgtatccccttttctttaaggcatttttttataaaagcagttgtttcaaattcttcttttgacagttcaggatattggtgcaggtgccggcgaatgccgatgagctgcttttctagcgttgagagatttacgggattatactcccctttcaacttcaggatgtcatttcctgtagtctgatatggataggagccttctatatttctccaataatccaaagacatatgtaccgctcctttccctatcccaatatattttcttcagactcttcaacataagatgaaataaatcggttcaatttatcagcaagaccgcccgccccaaatcttatatacttgctggaaactttcggattatcttctttcaaaaaacttaaaaaagataaaatataaatgcgcctgtaagctacttgtgtaattccgtactcaaaaaaccagttatcaatgacattgtatacgcctcggttgacgccatataggttgttacatttcttgtaaaagcagagatccggaagatttaactcctgatgggaaagcaggctttcttttttgttcggtgccataatcccaatcagttcaaagcgttttgcaacgcaccaaatatcctttttaatttgctttgttaaagactccaaagaatcaaaccttctttcttctctaattttaaagagaatgctgcattcgattttttctccatagatgtctctatgaaagtcaaacaaaaaaatctccaatgtccttttaaggttagagcccaccgtcggtttcacaccgatattcataacccctaaatggaattggtgattgactgtcgccagaactccataaactccattacgcagcccatgcatttttgcatctacatttgccgtggggaatccaagctttctgcctaattgttttcctttcacaaccgtaccggcaatgatcgtcaaaaaagtcagcctcctctctcagcttccgcattcgatcagacgaaacctaatgatgtgatgaatgtaaaacggattgatgctgcggaatgccaagaccgagattttcccgcaatgtcccgccgcgataatcttgacgataaagccctctttcttgaagaatcggaatcaccttttctacaaaagcatcaagtgttcccggtatatccgacccaatgataaacccatccgccgcctcagcgttgaaccaagtttcaattaaggatgcgacacgctctggtgttccgatgaatagagtccgtggaaaagccatttcctgtgctacctcccgcaatgtcagatttctggcttttgcttctctcttaatccggtctgttgtgctttgaaacgcattctttcccacatcgccaatatcgggaaatggctcatccaacgggtaaacactcagatcataatcatcaaaaaaacgagccaaataagtaacagcattttcaatcggtatcaattctgcaaattcacgatacttcttttccgcctcttcttccgtatctgccacaatcgggctgatccctggaaaaatccgcacacttgaaggatcacgcccttcatcagcagctcgccttttcacatccgcataaaacgcttttgtctcttctaatgaattggaatgggtaaaaatcgcatccgcatttttggcggcaaactgccggcctgtttctgatgaacccgcttgaaacactacaggctctccctgtttagagcgcccgatattcaagggcccctctacttgaaaatactttcctttgtgattcaggcgatgaagcttctccggttcaaaaaattgccctgttttcttattgtgtataaatgcgtcatgctcccaggaattccacagcccgcgcacaacatccaaatgctcctgcgcgatttcgtaacgctcagtgtgttcaggcagattggacttactatgattgcgcgccgccccttcctgcggcgaagtaaccagattccagccggccctgcccccgctgatatggtccagcgacattaattgtctggaaatagtgaatggctcagtaaaagatgtagagaacgtccctactaaaccaatatttttggtaaccgatgccagcgcagataaaatggtgatcggttcaaaacggtttaaaaaatgaggaatcgatttttcagaaataaataagccgtctgcaatgaaaataaaactaaacaaacctttttcagctgtttgcgcctttttcatgtaaaattcaatattcgtgctggccgagggatcaacatcgggatgacgccagccgtcagttgttcccccgacaccgtgaatcatggctccaaactgaataaaatctgaacgtgtcatctttttgcctcctttatctgtgcatgattagcaagtgcaagatcaaggtgttcaatgccgatttcagttatcccttgatagtgattgccgcgcccgatttcgaccacaggcacatggcgtaccccatatttcgcctgtaaaatatctcgaagttcctctttctctgaaacatcgatattttggaacgggaaccctttttcattcaaataattcttgacttcctcacaatacgaacagccttttttactccaaaccacaatgttcaaaacatcactcattcttctgaacctccttaacgttttgcagctaaaactgcatcgctcagcagctgataagacagctgtttttcttcagtatttttgatcggtgtaaaaataacaaaatcattgattttgtatgtgcctgataaacgtgttaattcttctgccacttcttcctttgttccggcaataatcccggttttttgcacgatgatgtcatagggctctgtgacgttttccagataggcctcagcctgttcgcgggaaccgacgttgaccttacgcccgtctttcaaatccacttttatcgattcacgcgacacaatatgtttttccgcttcttcttttgtatgtgccgcaaaaacagcgggggcaagatgaaattcagcctcagatcctggcgggagatgcgcgtcaaatgctcggcgggcttccttcagcacttcctcttcaccgttaataaagtaagcaaagacaaaagagattcccagttttgcagccgaaatggcactctctgcgcttcctcccaatagaaaaatacccggcttctgatcaacctgcggcctaggacgcaatgcggcatagcggtgggtatcaggaaaatcatcccgaacgaaatgagtaagctcctccagtttttcatcaaactgacgcaccggttttttatattcggcctgcagcgcgtctgtggacagctgaaacccgccgggcgctttgcccactccaagatctatacggccgggagctaacgctgatagaagatggaattgctccgctactttataagagctgtaatgctgcagcatcactccgcctgatgctaaacgaatttttcttgtgcttgcagcaagatagcctaaaagaacctcgggtgcagaccctgcaatctcatcattgttgtgatgttcggccacccaaaatcggtgatatccacactcttcagccatttgtgccaagttcactgtatgctgtaatgtatcagctgctgtctccccttcaccaatcaagctttggtctaaaatacttaagcggatcatatcaccggctcctttatgtgttcttttggttcaaataaatattccggcgaaacacggcggagaaactgcctcgttctgtcttttttggtatggcgaaagacttcctccggggttccttgttcaacaatgactccttcatccataaaaacaacttgatcagagactcttcttgcaaactccatttcatgtgtaacaacaatcatggtggctccggttttcacgatttccagcattacctcaagcacttcaccgaccagctccggatcaagcgctgccgtgggctcatcgaacagcagcacatcaggatgaatggcaagcgcccttgctatccctaccctctgcttttgtcctcccgataactgactcggataagcgttcaatttatcttgaagcccgacctttctcagttcattttccgctacggcatacgcgtcttgttttctcattttccgggcaatcgtcaagccctccatgacattttcaatcaccgttttgtgagcaaacaggtggtattgctgaaataccattgccgtctgttttctgagccagtgaacctcttttttggacggaaagctgcaattaatcactttgtcatgtatagaaatgatcccttcgtctggacgttctaataaattcaggcaccgtaaaaaggtggttttccctgatccgctcggcccgataatcgtcacaacttctcccttgcgtaccgtgagatttatcccttttaatacatggtggatgccaaactgtttatggatatttttaatctcaatcataaagtgcctccttgaaatctggctgcctttctctctaatactccatttgcggattctaggattagagtcagcacccaatagataatcgctgctccgataaacgcttctaaaaatgcataattatcagaagcaacgatagtcgccgtccctgtaatctctgggacagccactatagccgcgatagaggtggtatgcaaaaagccgatacccaaatttgtgaagtttgggatggaaaccatcagcgcctgcggcaatattacacgccgaaaggtttggctgtgtgtcaagccgattgaataagccgcttcgacctgtccggtatccatcgccagaatgcctgaccggatgatttctgtgagataagctccggcagttaaagacaaggccatgatgacaaacatggagaccggtatctcattggcggaccagccgagatgaaaaaaactgctgacttgatctgcaacaggaggtatccctaaataaatcaacataatgtgaaggattgcaggtgtacttcgaaagaaagacacataaaaccttgagcaagccaccaagcccttaattctaaaaattctaacaattatatttccaagagccacgagaaatccaaacacaatcggcaaaacagccatcatcaatgtcagaggaatggtctttaccatttctttcatggcggaaacgataaatggaaagtcaaattgcaatcttctcccccctcatccgaagaaatatatcaatgtatgttcatgtcaaaaacagtaacaatccttgtttgattcttcttgattcgtttttctgccactcgaaagaaccattcgaataaaactgcaacagcataataaacaatcgatagcgcaatgtaaacttcaagagaatggttgcttgaggtaatcagtgtttggccccttccggacatatccataacacctattgaaaaagctagagatgtatcttttaaagaactgatcaccatgtttcccatattcggaaatgcctggacaagtgcctggggcagaacgattcgcctgaaggcctgactaccgcttaagccaatactgtacgccgcttccgtttggcctttatctacactgcccacccccgctcgaatgatttctgcggctgccgctgcattgcttaacgcgtaggttgcgacagcagcataaaacgggtccatttttgatgtatcaatcccgataagtcccgtaagcgccgggattccgtaaaacacgatgaaaagctgcaccatgataggcgttcccctgaaaaatgagatatacacttttgccaattgatttacaattggaatattgtagatgcggggcagtgccagaaagagtcctaatacaaaaccgaaaagcaaggacagtgttaaaatgtataatgtaaccggtaaataagcggttaacgtcggcacaaaatctccaatcatgttcatatcaaacgctttttccatcactgctccctctcttttcacctaatactgctctttggaatagtcgtcaccaagccattttaaactgagttttttcagcgttccgtcatcaatgatttcctgtaaggctttatcaatatcgtcacttaacgtttgttcatttttgttaaacataaaatacactttggcatttgaaagcacatgaccgacggttttttctttaatagcgctcgtcttgttttgaaagtctactgcaaaaggcgttgagatcgttgcgtccgcacgccccgatttcagctgattcgcagtctcatttgcgccttggccctcataggcaatctcaaacggccgtccattatcctcattccattttttcagtacaagcgctccgttggaggttgcactcgtaatcacccgttttccttttaagtcttcaattccacggatcgtatcgttattttgaagcacagtaatttttaaaggaaaatggttgtaagcaaccttgttaaacagaaattttttctcacgctctttgcttttctccatttgatgtgccacgatatcgactttatgctgtccgaggctgacaagcaggttggaaaattccatcgttttaaatgtgaatttataatgtggcaggcgcttatcaagctctttgatcagttcgacatcataaccggttaaatcgcctttttcatcaataaagcaaatattcggaaattgggttccagttccgaccgtgatcgtctgtaccttcttttgcccggctcccgtcgtttgactgcctgcaccgcaagctgacagaactgttataagcgaaaataatattgccatgaatgctgttttcgttttcatctcatcgccccatttatttttcaaaacttgattttgaataatctgccccgagccattttcggcttagtttttttagcgttccgtttttctccagctttttaatcgcttgatccgtgtcatccgccaaggtttggctgcctttattaaacataaagtacacctcggtatctaataacacgtcaccgactgtcttttggcggaaggcgtgcgttttattctgaaaatcgacggcaatcggtgtagctatcgttgcatctgcgcgcccggtttcaatttgattggcggtatcattgcttccctgtcccgcatatttcaaatgaattgggctgccgtgcgttttgttgtactttgtaatataatctgccgcatttgacgtggcgccaactatgactgtttttccgtgtaagtcttttaatgtatgaatcttgtgattatcctctttcaccgtgatgtacatcggcgagtagttatatgggactttatgatacaaaaaacgcttttctcgttctttatttttggccatattgtgcgcaatcacatcaatttttttatttccgagactcgtcagcaaatttgagaaatccatcgttttaaattcaaatgtatattgaggcaactccttatcgatggctttcatcacttcaatgtcatacccggtcaattcacctttttcatttaaaaacgcaatattcggaaaatctgttccagtgccgactatgaccgtttgagcctgacgatctgttttgttatttgtttgcgaacatcccccgccaagtaatgcaaacactgacagcagcaaaaccaatcctttacgcttattcataggctgcctcacatcatgcccagctgggcgcacctaaaagcgttgggttaaatcgttccggaatcagaaccttgtgcatcatcacacctatgtccccgtctttttcctgctcaaaatacacttcataccctctccttctgtacatgtcagcaagccaaggatgcttgcgcgccgatgtgccgagtgtcagcgcaggagccttcagcatatctcgaagcactttttcttcaacatacgtaagcagcttacttccggcgccttgccctttatattccggcagtgtcgcaaaccaccacacaaatggatattttgaaggaggcgtctcactctcccacgggaacctgattgtaatcgttgaaatcagcttcccatcccgctccagcacaatcgctgaatgatgttcaatattttctgataccatttggatatcagctctcgtggatggccaatcaatatccagctgccgaatgggctgaaatgcgctgttaaccagtttcaacagctccgatgcatcttcaacagttgccagtcgaaaaatatcatcactcatttttgtcactcctcttcacaatatatataattcctatttgtttactaatcttttattgtttatactataaagcatactctgatctttgactaatcaaaaaaagtaaaccttcacttcagtaattttaatgatgaaaaacaggagggagaacattggagttacgctcaatcaaaacgtttcatacgattgtaaaatttggaagcttctataaagctgcagaaatactcaactactcgcagccgacgatatcgatgcgtatgaagcaattggagcaggatttaggcgtactgctgtttgaaagaggaaaaagcctgcagctgacaaaagcagggaaacttttttatgaacgaacaggagatcttttgatgcaatacgaggcgcttaaacacaacctctccgacttaaaggaagaagaggcaggcattatcaacataggggtttcagagccaaccgccagtctgatattccccgagattttaaaggatttcttaaaggattacccaaagataacagttaatatcaaggttgatgacgccaatacctgcagtcaaaagctcttagacgggacgattgattttgcagtctgcggcgagccggagctgattcttgaaaattactaccatccatttttttatgacacattaaatgtgattgtatctgagcaacatccgctcgctgagaagaaggctgtccatttgtctgatttagcagaagagcgcttcatatttacgcccgccaattgccccattcgcttacaaattgaacagcatttacatagagaactcgggaatcgttacaaaaaaatggagctcacaagcagcatgtcacatgaatattacgtacgtgaaaacatcggaatttcaatctttaccagcaccgcacattctaaaccgttcaacggcactaaagtcattccaattctgaacctggatatcaccccgcccatagggctgttgacaaatcaaaaagaagttcattttgaccgcgccacgaaggacttgatcgcccggataaccaaacgttttcagcagcgcagcaaagaattggaaggaacctctgataagaccattacaggataactgaaaaaataaaaaccacctcctgattcatcaggagatggtttcacggtttaaagctcgatcgtctcaccgaccgacatgactttgccgactccgcccggcaggctgtcagcgaatgcttctgggtcttgttcgatgaccgggaatgtattgtaatgcaccggcacgacctgttttgcgcgcagccattcagcagcaagcttggcgtcttcaggccccattgtaaagttatcgccaatcggaaggaaagcaaggtcgatatgattcaattcgccaatgagtttcatatcagagaaaagtgccgtatcgcccgcgtggaaaatcgttttatcttctacagtcagcaaaataccggcaggcatgcctgtgtaagtgatcgttttgttttcttcatctgtgatggctgatccatgaaaggcctgtgtgagcttcacttttccaaaatcgaactggcgggagccgccaatatgcattggatgaacattcaagcctttccagcctaagtacacagcgagctcgttcggggctataaccaacgcgttattttgcttggcgatttgttcagtatcaccgacatggtcattgtggccgtgcgttaataagatgacatccgcttttacatcctccggctttatatccgttaatgaattccctgttaaaaacggatcaaaaataatatgatggtccttcgtttccactgtgattacagaatgtccgtgatatgtcactttcatttctttcacctcgtcacatgattttgatttttttattttccctttttaaaaagctgaaaaacttatgttgtttgattcttgttaatgacattgaggccaccggtggcttcaatgacagtccctgtcacaaggtctgagttctcctcacacaagaaagcgataatccgggcgatatcctcgcctgtaccggatcttcctatcggcgttttttctttgccgattcgcattctggcttcctctatcgatgcttctttcatgtcgccgacaatgtctcccgggcaaaccatgttggcggttatgccgaattcggcttcttcaatggcaattgtcttcgtcaaagaagccaagcccactttcgcagcgccaaatgccgatcggtgaagccagccgggcgcgtgagccgcaccttggaatccgtacgtaatgatgcgtccaaattgctgttttctcataataggaataaccgctttgaataaatgaaagacggcgcttaaatttccttccagcatgccataccattcatcatcagtataatcggctaactttttacgttcaaatatgtatggtcccgcgttgttaatcaaaaagtcgatccttccgaagcggtttaaggcagcctctgcaatacgcagcagatcttcttttttggtgacatcaccttttacaaattgcagccggtcaagacaatcgggacaggcttccttcaggcggctgactgcctcctcatcctgtctgtaattgactgttactgaatacccctttgcaagcaacgtttcagtcactttgcggcctaaacccttcgaaccggcagtaattaaagcatgtcgcacatgaatacctcccaaagcaacgtcgccgctttcaataaagtgtttcttcttctactttactataaaaggcttgcaatatcactttttacactttggcatacaaaaaaagctgcctgtacagacagcttattctgcaggagatgaagactcctgatcaggcatatcgacataaccgctttgatatgcttctgaaatgagccttgttgtctcctggctttcttgttcatcataaatatagcgttccggttcttttttcatcattctgcctcccatcattatagaggtaggttggctataatgacgggattttatgaaggaaattttaacaaactcctgctgctacgcaagctttcgctttttcaagcgcctgctttacctgtttgaatccggtgcccccggcgctcattcttttttcaactgcgtagtaagggtctaacacagtgtaaatatcttcttcgaatagtgtgctcgcctgctgaaactcgccaaacggcatatcgcttaaatagatccctctttcgatgcatgtgtacacaagtttcccgaccacttcatgcgcttctctgaacggcattccctttttagctaaataatccgccagttccgtcgcatttgaaaagtcttgttttgttgcttgcttcatgacgtctttgtttacagtcattgtttggatcatgcctgtgaagatttgcaggctgccctccaccgttttcaccgtgtcaaacatgccctctttgtcttcctgcagatctttgttgtaagcgagcggaagtcctttcatgatcgtaaacagccccatcatatcaccgtatacgcgtcctgttttgccgcggatcagctccgccatatcagggtttttcttttgcggcatcatgctgcttcctgttgcgtacgtatcgtcaagctcgatgaatttaaactcctgcgagcaccataaaatgatttcttcagagaaacgggataggtgcatcatcagcatactgctgttgcttaaaaactccaaaatgaagtctctgtcgctgacgccgtccaagctgttttcataaatggcatcaaagccgagcagttccgctgaataatcacggtcaattgggaaggttgttcccgcgagcgccccgcagccgagcggagatttgttaatccgcttcattgaatcctgaaaacgctccttgtcgcgctcaagcatccagaaatacgcaagcatatggtgagcgaatgaaatcggctgggcgcgctgcagatgtgtgtagcccggcagaatcgtttcaacgttcgcttccgccttttcaatcagcgcactttggaatgcctcaatcagctcgatgatgtggccgacatgattcttcaagtataaatgcatgtcagtcgccacctggtcattccggcttctgccggtatgcagcttgccgccaagaggaccgatttcgtcaatgagcattttctcaatgttcaaatgaatatcctcataatcgactgagaattccaatgctccctcctctgctttttgcaaaagggtattcaggccctctcggattttcaactcttcttctgctgtcagaataccgcattttttcagcatggcagcatgtgcgagagaccctgtaatgtcttcagcaactaaattttggtcaaatgatatggacgcgccgaactcgtcgacccatttttccggtgttttttgaaatcggcctccccagagcttcttcatgctttaatctgctccttcttttttacgatgctgttcacttttgtcggaagtccccaaagctcgataaatccaattgctgcatggtgatcaaatgcatcgtcttttgtatatgttgcaagtttttcatcatatagagagtattctgatttacgtccttctacaattgcatggcctttaaacagcttcacgcggacaatgcctgtgacatgcttttgcgtttcttttaagaaagcgtgcagcgcatcttttaacggcgagaaccataagccgttgtaaatgatctctgacattttttgctcgatgatcggtttaaagtgggctacctctttcaccagtgtcaaatcttctaattctttatgcgctttgatcagtgtcatcgcaccagggcattcgtatacttcccgggatttaatgccgacgaggcggttttccacgtggtcgatacgtccgacaccgtgcgcgcccgccatttcattcagcttcaagatcagctcagaaagcgagtaggaaacaccgtcaatggagacaggcacgccctgttcaaatgcaatttcaatcacttccggcgtgtccggcgttttttccagcggagctgttaaatcgtatgcaccttctggcggcgccgcccatggatcttctaaaatgccgcactcattggcgcgtccccagaggttttgatcgatagaatacgggctgtcaagattgatcggaatcggaatgccgcggctagccgcatattcaatttcttcttcacgtgaccactgccattcgcgaaccggcgcgatgacttctaggtcagggtttaatgatttaatggagacttcgaaacgaacctggtcatttcctttcccagtgcatccatgggcaatcgcctgtgcatcttctttttccgctatttcaaccagctttttcgcgatcagcggccgagataatgccgaaacgagcgggtattttccttcatacatcgtgtgggcctgcaaagaaataagcgcgtaatcctgtgcaaattcttcttttgcatcgatcacgtaggagtttgtcgcgccgacttcaagcgctttctgctgaacaaatgccaaatctttgccctcaccgacatccaggcagcaggcgatgacattatatccttgctcctgaagccattttattgcgacggaagtatcaagaccccctgagtatgctaatacgacttttttctgttctgacatgataaaaatcccctctcaaccgtgtttctattttgtataaaaataaattatatttaataaaaatacattttgtatgtatacactttaacaagtacgtttcgttttttcaagccttttacaaaaaaaacttcacctaaatttcaggtgaagtttcgtagtatttattcatttacttgtcttttctgatttctctgaccacatgtgcaagttcgggaataatcagcttattcattgccagctttaccgcgccgcttgagcctggcgttgagaaaacagcggtatgctgaatgacgccggcagttgctctcgacatgattgcggcagggccgatatcctctgtataactcagcatcctgaatatttctccaaagccgggcagttctttcgaaaacagcggcgttatggcttcaattgtgacatcccgatctgctatgcctgtccctccgtttaagagtaccgcgtctgtctgttcatccatgcagcccgcaagcactgaccgctgcaaagcatccttttcgtcttttacaatttcatatgcggcaatatgatgaccggcttcttctaaaaatgagatcatcagcttgccgcttttatcggtttcatctgtcctcgtgtcactgacagtaatcactttgcaccgaacgatatcgggagcttcttgtttatgctcttgaacgctcattggcccacctcttttatgttttctgtctgtcactatcatgcatcaacaaaaaagcacattcaagagaatgtgctttcatgcgatttattttgctaaacgaacaacgtcgcgcgcaatcatgacttcttcatcagtcggaatgatcatgacttttactggagaatgcggatagctgatgaaagcttcctcgccgcgcacgttattaagcgcaggatcccagtatacgcccatgaattctaaaccgcgaagaacgcgttctctgacttccacactgttttcaccgataccggcagtaaagatgatcgcatcgacaccgctcattcttgcagcgtaagaaccgatgtatttgtggattctgcttgcgaatacttcaagagccgtttccgcgcgctcatttccttctttcgttgcttcaacgatgtcacgaagatcgcttgagaaaccggaaatgccgagcagtccgctttttttgtttaatgtattcagtacttcgtcagccgtttggcctgttttctccatgatgtatgggatcagggcagggtcgatgtttccagagcgtgtgcccattgctacaccggcaagcggcgtaaagcccatggatgtgtcaatagattttccgccttcaacagcggcaatacttgctccgtttccaaggtggcaggaaatcaggcgcaagtcttttaacggacggccgagaagctctgccgcacgctcagttacatatttatgtgaagtgccgtggaagccgtatttacggatgccgaatttttcatagtattcatacggcaggctgtaaaggtaagactgctcaggcattgtttggtggaatgccgtatcaaatacagctaccgcaggaacatttggaagcacttctttgaacgctttaattccaacgatatttgccggattgtgaagcggtgccaattcagaaatatcttcgatttccttaatggtttcatccgttaataaaacagaatcgctgaatttttctccgccgtgaacgacacgatggccaattccgtcaatttcattcaagtctttaataatgccgaattccgttaacttattcagcagcattttaacagctaccgcatgatccggaatatcagttacttctgtatttttttcgccgttcacagaagttgtgaatacgctgtcggcgataccgattcgttcaactaaacccttcgttaaaacggtttctgaaggcatttcgaaaagctgaaatttcaaagacgagcttcctgcgttaattgcaataattttggacatgattgacgctcctttatactctgtatcaacaacttcgtttttcgtacttttttcccggtgaatatcaacatcttctccgaaaaatatctgacttttccatttaaacattgtcatgtcggcttttcaagtcaacttgcgtattgataacgcttacaataagaagtcgttattttcagacacattccctataggttttgtattgatgaacgcttacaatttgcggtttttccctctgtattttgtgtttcaaagctggattcaattcgtcaagtccggtcttcaaaagcataaataaaagcagcttaggcatcgacctcatacggctgtctaagctgcttttaaaacacttacttttcttttttaaaccattcatcaaattgagccatcatatcaagcatcgccttttgattggagaaagacggaagattcgcaagcagaatttgccccggcgctttcgtattctctccttgtttctgaagcacaaggatgcttttggcatgagcttcgtctttaaaaatagattttggcagctgcaacagtgcgttgatatgaaccttatctttgaaaaactgtttcagcttgccgctttgggagctctcaaacaaatgattcggaatcataaaaaataagtagccgcccggtttggtatgcttgacgctctgttcaataaacagatgatgagcgaaggaatggccttcgtcagctttaagctcaaacgcttctgctccttcgtcattcggataatagccgactggcagatcacaaatgaccgtgtcaactggatcgataaacaacggctcaaggctgtcctggtggaaaagctcaagctcttttttcagaaggttcgcttgggcataggcgatcttcaagagcacatcatcaatttcaatgccaaagctgtttgccgttttttcagacagctggttcagcacggtaaacagaaggttcccagttcccaaggctggatcaagaatggtcaattcctttttgtccgccataaacttattcaccaaatagctgatgaaaagcccgatcgtatccggcgtcatttgcctgtttggatgggagatatctttcattcctttaaggacggcaagctgaaaagccttgcgtacccactcatgctcatacgtgccgaattccgctttttcaagcagagcctgaagttgtttggttttctgatcagcaggcagtttcagctgatccgttttttcaagaaaatacatttctcctgcttcggcaagcgcctctatatatgaaatctgcaattcattctttatcataatcgctgcttcgtttaacagctcatacaccgcacctacatggtctttttgcatattgtgttcctccttgccatgaaaaaagctccggcggcagcctggagcttttttccctgcttacttcactaatgccttagcagcctcaattggcttttcatagttcgggtggtttgttgcttcgcttacatattcagcgtaaacgacttttccattctcatcaaggacaaatacggaacgcgcaagcagacgaagttctttaatatacacaccgaacgctttgccaaatgacatatctctgtggtcagacagtgtttccactttgtcaattccgttagcgccgcaccagcgcgcttgcgcgaatggaaggtctgcactgattgtgtagacgttgacatctccaagctttgcagcttcttcgttaaaacgtcgtgtttgtgcatcacaaacacctgtatcaattgaagggataacagaaataatcgttacctttcctttcatgtcagctaacgatttttcttcaaggctgttagtcagcactgtgaaatcaggagcttgatctcctaccttcacttcttgtccgacaagtgtaaccggaccgcctttgaatgtaatttcagccattataattcctcccttttgtatgtatgtctctatcatagtaaagtttcctgcaaactgcaaagtttatgccaaaaaaaagttaactgcggccagcgcagttaacctttttttaataattcatattgttcatttggttttgattttggccctgactttggttcttgttatttttcttgaacatttgctggatgcgttcgagtgtttgaggggctgcgtctaaaattttctctattaaatgggtattttcatctaaatgaagcattctgatgcctgtcgatccgacaattaaaaacgcgatcggcgtaatggacacaccgcccccgcttccgcctccgaaaggaagtttctgttctcttgtctcatcgtcttccgatttcttttcggccggctttccgccaaactcgcttccgcctgcggcgaatccaaatccaactttagaaacagttaaaatcacacttccatcaggcgtttctactggatctccgatgatggtgttaacatcaatcatttccttcaagttttccattgcggttttcattaatccttggatgggatggtctgccatatacgcttcctccttaaactgatgaatcattctttgaagtcattctagccgacggattcttctttaatacggatagctcccgtccgtatttgacgaatttgaaagctgcaagcatagcatgtccaaagcgaaaaaagaatatacactgaaaatgggtcttggaagcaggggcttgaaacgacgggatcacctcatagacaggtttattcacaaagtccaggtggtcgtagagcattgctgcgataccgcccttcacgccccatacagcacctgttaacacacctgtcactgccgcgtcctgaattccgattactgtaacccattctagttttgtgatatgtaaatgcgcgagaaaagacgcgctgattttccgtagtctggtgacctgatgcaaaagcatttcgattttattaatgctttgctgcacatcgttttgtgtaatttttttctttccgctgctttttttcattttagattcagttttttgtttgatatccactgttccgtcttctttgttcaccttaatcgccgggattgtttttttgatccttataaggccaaacagcgccgtaatcttcaaggtcaatttgtcattatcagcggcatgaagatactccagcgcgacatggattttcattctgagaagcagtacgatccctatgagaataagaatggctgtcagtacatacaccatattcttcacttcctctaggagcattatcgccaattcctaaaaaaataaacccggacggaggtccgggttatcggttatttgcggtataatttttcatgcaccacggtggtatccgcgatgtaatcatgaatcccttgttttgtaggtgaaaaagcaacaacgatatataaaatccaaatcttatcaatataccgtccaaccacttcacgaaaaatcactgtactccatgtcagcttgctatcttgcttcacagaaaccactttgaggccgaacaccattttaccaagcgtctgcctgaagtatttagtcattagtgcgaagtaggcaagatacacaataagcgttgtcacactgtaggccgagaaggtaaacatgccggatgttttcggcagatccaatacggtaaagaggggagaaacgagcaaatggtttaatccccatatcacgagccaatcaagcaggaaagcccagaaacgaacccaaaagccagcataggcatgtgtcagctgctccgcttcttgcgggcctttgatgtcattgcgctctaactcttcatatgtcgcgtccattattgttccctcctacttcgcatagagatacatcattctcggcgaaccggattgcgatagaatttctctcatattcaaaaaatcaatttcacttttaaacattttgttcgcgcccatggaaaacagtgagcctaatccgaagctttcctcataagaaatgacagaggcgtttttcaaatccttgtgatcctttttcatggccgtaatggtatcgtcataaaaaccaagctcatcaacgaggttcagttttttcgcctgccgtccgtcatacacgcggccgtccgcaattttctttacctctgctttcgacatgccgcgcccttttgaaatgacatcaacaaagccttcatacgaattatcaaccatcgattgcatgatgtttttttcttctttcgtcatctcacgggaaggagacataatgtccttatgggccccgctcttaatcgtttcataagaaatgccaagcttatcggcaagctttgaataattgacgctttccataatgacgccgagtgacccggtcagggtttccggtgtcgcaaaaaccttatcagccgctgttgagatgtaatagcctcctgatgctgccatcgaacccattgacacgtaaatcggttttttcgtttctttcttgatttcttccagtttcttatgtatttcagcactttcatacactccgccacccggagaattcaccttcagaacgatacctttgaccgtcttgtcatcttttgcgcgctcaaggttttttaagaacgttctgtggttatatccgtctgcaccaagcagactgcttgagtccccattatcctgaatggtgccgctgacctctaatacggcaattttacttgagagactgccgttttccagcgtcttttcctgcgattcatccgtcagtgatgtgagatccgtttgagcgcctttgacgctttcaaagaaactcatagagatgctgacgataatagacacgccgaaaatccccagagcaatcactaatgcaatccatctttttgcattcattttttctcctcctttttcctaaactctctcattatacgattcaatatgaaaaatgtttcacttcatgagaaagctccggcttaacgggctgccggcaaacgtggtacacttatggccaaaggtattttatcacaaatactggatggcagaaaaacttaaatatgacagcaaaggggaaatgggatatgaccgatcaacgccgtaatgtttatttttttcacaaacaggatcaggaaacgaacgaacaagcccgctcgttaacacaattagcggaagagcatggatttaccgttgtgaaccagcactcagacgccaatattatcgctagcattggcggggacggcacatttttgcaggcagtcagaaagacgaattttcgtgacgactgcttgtacgtcggcattaccaaaaaggggaaagctcatttatattgcgactttcatagtgatgagcgagaaaaaatggtcgatgcaatgacgtttgaacaaattgaagtgagaaaatacccgctgattgaagtgacagtggatcaagccagtccttttcactgcttaaacgaggtatccatccgctcaagcatcatcaaaacctttgtgatggacgtgctgattgacgatctgcactttgaaacgtttagaggtgacggaatgattatctcaacgcctacagggagcaccgcctataacaagtctgttgcaggagctgttgttgatccattgcttccatgcatgcaggtatcagagcttgcatcccttaacaataatacctaccggacactcggctcgccatttgtcctcagctctgaccgaaagctgacccttcgtgtggtgcaggacggcaacgaacacccaatcatcggcttggacaatgaagcactcagcacgagaaatgtgaaaacgatcgaaatcaaactgtctaataagaaaatcaaaacagtcaaactaaaggacaattcattttgggaaaaagtgaagcgtacttttttatagaaaataaaaggacaggctgctgcctgtccttttatgatttctcatatacaatctggccgttaatcacggtttttttaatatctaaaagatgaagctgtgcggggtcaatggcaaacggatcaccactgagaactgtaaaatccgcatcatagccttccgcaatttttccgcgtgacttctctttataaatgataccggcgctaccttctgtataaagctttatcgcttcatatacaggtaaacattcactttcattatagcttggcccgttttgctcatgactgcttttcctgaggaccgcggactggatccctagaagcgggtcaacaggctcaatcggggcgtctgaaccgcccgcgcataaaatgcctttagatatgagggttttccaggcaaatgcagtcttcatccggtcttttccgagacggtcaatgacccacggaaagtcgcttgcaacgaaatgcggctgaagatcaagtgcgatcggcatgcgtgctgctctctcgattaattcgttatcaagcacttgggcatgaataagccgatcatgccggccgtttttgggcggatgcttttcaattgcgttcagcactttttcaaaagcaagatctccgattgcatgaactgcaacctccatccctttttctctcgctttgcgaatgagccggccaagggtttcatcatcgtgaacctgaacaccatttgttgatggatcatcctgatatggttctttcaataaagccgttctcccgccaagcgccccgtccgcaaagattttcatcgcaccgaactccacatacgggccggacagcttctccagctgctcccatcgatcgaccgcttcatgatgaacgagcaaatggcagcgaaacggatactttccgccagcggcagctttctcataagctttcaacggcaccgaaacatcaccataataggacaagtcttccgaatgaccgcccgtcaggccttttgtccagcaatcctttattgcagccgttaatgcctcatcaacatagtgctgagagactggcgggacagccttcagaatcaaatcctgcgccttatcaaacaggagtccggacggctctccatttgcatcttttacgatgactccgccgtcagggtcaggagtatttcttgaaattcccgctgcttgaagagccgcagaattgacagctattgcatgccggcatatacgcttgagcaagacgggtctgtctggaaacaggcgatcaagatcatgcttagtcaagtagtcaggtgtcccaaactgattttcattccagccctctccaatgagccaatcgtttttaggaagctgccgctctctttccttcgcagcctgtaaaattgaatctttcgacgtcagtgcggacagatcgagctgaagctgtttctcaccgtggccgatcaaatgtaggtggctgtcaacaaaaccggggaacatcactgcaccgttcaggctgatttcttctgtttccggtgacccgtacttttccttcaaacgttcatagctgccggtgccttttatgacaccatcctcaacataaactgcctcagtccgatcgccttcttcgagcatcgtataaatgaaaccgccgtgccatatcgccttcattcacgttcactctctttctttacgcctttttattggctttgagctgttcttcacgttttcttaattccactcgtctgatttttgcagaagccgttttcggcaggctttccacaaattcaatttctctaggatatttgtatggagcggtaatcgtcttcacatggttttgcagcattttgacaagctcatcactgcgtttttcatgattttgcaggacaacatatgcctttacgatggagcctctgatttcatcagggcttgcgacaacagcacattcttttacttctgggtgcttaacaagcgcgtcttccacctcgaaaggcccgatcgtatagccggagctgataataatatcgtcatttcggctttcaaaccagaagtaaccttcctcatcttttcttgctctgtctcccgttaggaaataatcgccgcgaatttgtgttttcattctttccggatctttaaaatactctttaaagagcgcaggcgtactgaggtgaacagcgatatcgccaacctcaccaggtttgcagatttcaccgtcttcatttatgatctccacctgatttcccggtgtcggttttcccatgcttcccggtttaataggcgtatctttcaaaacaccaaccaaaagcgtgctttctgtttggccatatccgtcccgtaccttaatgccaaagtgcttttggaaaacatcaatgacttcacggttgagcggctcacctgcggaaacagcgctgtgcagggcagaaagatcaaagcgttccaagccttcaaccttcgccattaagcggtattctgtcggagtgcagcagaaaacattgattttgtagcgatttaaaagctctagatatttttctgctttgaatctgccgtggtacacaaaaccggttgctccgctgccaagcaccgctaaaaacggactccatacccacttttgccagccaggggcagcagttgcccagacgatatccttttcagaaatgtcaagccaagcgccggcagaagtttttaaatgagcaaatgcccatccatgtgtatgtacaacacctttcggctgacctgttgtcccggatgtataagataagaaagccatatcatctcttgttgtgtcagctgttttaaattggcttccgtccgcttcaattgataagaggtttttccagccggcatcattttcaccaatagacagtgtaatcagtttgtcagtcgtactgacatcccggaaagcgccaataaattcggagtagacgatagcgccttttacctctgcatgttcaatccggtattcaagatctttcgcgcgaagcatttcggagcacggaatgacaaccattcctgatttcaggatagccaaataaacagcataggcttcaagcacccgcggaaccattacaatcagcttgtctccctttttaaatccaagatcagctaaggccgctccgattttatttgtttcttccatcagcttttcatacgaccaagattcttgcttgcccgactcgtcctcccaaagaagagcggttttttgtccagcggcactgaacttttccatttcattcactaaattatattgcataggggcaattaaatcttcacgttttaacacgaacaactcctcactttctccacccattatacataaatacaggctctttccgtaaggatatgcctaaaagcaacctctgtaaacatagattttataggccgctggtccttttttatattataaaaaatgaaaaggagtggggatacccccactcctaagccattatgtgaaattgtaaattagaattgtcctccgcccatgttttgttgagcaaaagatacaagacgttttgtgatctctcctccaacagaaccgttagcgcgagaagttgtgtctgctccaaggtttacaccgaattcagaagcgatttctaatttcatttggtcgatcgcttgagcagctcctggtactaaaaggttgttgctgttacctgagttattgttagccatgtgtctcacctccttgtgagtatagaatgtgtcaaaacacatggcttcattcagaaaaactttggtaattgtatacaggagctgaaaattgatttaaaagagttcagcgaatttatcgttagcttcttgttcgctataaagggtcattgtctcaatgttatctaccgcttcttgaatatacggctcgaaatcaacaaagctttcaaagtgttcaattttctcttttttagggcgtgttttcgggcttggcggtgtaaagatcgtgcagcagtcttcaaatggctgaatgcttgtctcatatgtgccaatttcccgtgatttttcgatgatttctgttttgtccatggcgattagcggacgcaaaatcggtgttgacgtcaccgcattaattgcatacatgctttcaagcgtttggctcgctacctgaccgaggctttctcccgtaataatggcaagcccgtttctcttttctctgattctgtcggctatctgaagcatgaggcggcgggttgccgtcattgtgtaattttcaggaatttgtttttggatgagctcttgcgtttttgtaaatggaacaatatgaagtgtcatgcttcccccaaaacgggacagacatttcgccagatccattaccttttgctttgcgcgctcgcttgtgtatggcgggctgaagaaatgaacagcttctaccgacaatccccgtttcatcgcataaaaaccggccacagggctgtcaaaaccgccagaaagcatcagcatcgcttttcctgctgaaccaactggcagcccgcctgcacctttttcatcacgaattgtcaaaaatgttgcttcttccctgatttcgattctgagcgggatgtctgggttgcgaacatcgaccgtcaatccttctgtatttcgcaaaatatggccgccgatttcagcgttcatctggtttgtatctaattcaaattgcttatacgctctctttgtcgcgactttaaacgtatcacctggtttatactgatctttgatagcctttagtgcggttgccttaatatcatcaaggcggctgtcacatttaattgccaggctgaagctttgaatcccaaacacttgctttaaatgaggaaaaagagcctcaggatcctctccatttaatgtaatcgtcatacgatccctgttggaaaagtattttaaattcggatagtctttcaaaacgagtctgatgttttgttttaagcgctcaataaagctttttctgtttttgcctttggtcgaaatttccccaaaacgaattaatatatgatcgtaattcatgttctacctcatcattttccttaattttttgataccaggacgaagcgcgttcataaacggttctgccacatcgcttgtctggctgtaatttaaactgattctgatgctgcttccggcaatctgctctcctttgcccatctctaagagaaccttgctgggcttatgttcttttgccgagcaagccgatgttgtggagacgaaaatatcctgttcctcaagcatgtgtaaaagcacttccgctttaatccccggtacagagaaattaataatgtgcggcgcgctattcatttgaggcgtgttgataacgacgccctcaatttcactcagccttttcataaacaattcctttgcggcagtcatcgtgtcaagccgtgtgtcaaaatcagcagaggcaagattaatggccttggcaagcgaaaccgctccagcagtatgttctgttccggcccgtatgcctttttgctgagagcctcccgttatgagcggaataaggcgtgttccctcttttacaataagtgcgcctgtcccctttaggccgtgaaatttatgccccgaaattgaacatagatcaatgccggccttttcaattgccaagggcactttatagatgccctgcacataatcgacgtggaacaaaatgttcgggtgcttcttcagcacttcccctgccgcttcaatcggctgcacggaaccgacttcattgttcacatgcatcatgctgacaagcacggtatcgggacggatggctgcttttagatcttcaatagaaacaaatccgtcttcattcacagaaagataagtgatatcaaacccgaacaactctttcagctgttctaacgattccgtaacagatggatgttcaatagaagtggcaatgatatgtttgcctgtttttatctttgacaaagccgctccttttaaagccgcattattggcttctgtggcgcctgacgtaaatacaatatcatatttttttaggcctaaggaccttttgatttgatttttggctgcttgaagcagctgttccgtttcggctccatatcggtgcaaagatgaaggattgccaaagtatcggctgcttgtctgttcatatacgttcaagacttcatcgtaaggcttcgtcgttgaactattatctaaatatatcatcttttttactcctttatgaaagcggtacaaggtatgatatttatgttaccataacaaaatttaatagaaaattacgaaaaactagtattgacttctaatttttttaccatataataagatttgttcgtttcgtcatattatctgacaattaattgacagaatattttaacataattattaggaggatttttttcatgaaacactcactgcctgtcaaagataccattattattggtttcatgctatttgcgttattctttggagcaggaaatatgatttatccgccggaacttggacaagcagccggacacaacgtctggaaggccatcggcggatttttactgacaggggtaggcctgccgcttctcggcattatcgccatcgcattaaccggtaaggacgctaaaggccttgctgacaaagcgcaccctgttttcggcacaatctttactgtcgtgctttatttatcaatcggaccattattcgccatcccgagaacaggaactgtttcatatgaaattggcgctgttccgtttttgactggcgtaccagaaagactttctttattaatatttacacttatctttttcggcgttacgtactatttagcgttaaacccatccaaggttgtcgatcgagtcggaaaaattctgactcccatcaaattcacgattattttaatcattgttctcaaagccatcttcacgccgatgggcggattgggcgccgtgacagaagcatataaaggaacaccggtttttaaaggatttttagaaggctataaaacaatggacgcacttgcttcaattgtatttggcgttgtcgttgtaaatgctgtaaaaagcaaaggcgttacacagtctaaagctcttgctgcagcctgcattaaagcaggtgtgattgccgctttaggcctgactttcatttatgtatcccttgcttatttaggtgcaacaagcacaaatgccatcggtcctgttggtgaaggagctaaaattttatctgcatcttcccattatttattcggttcattgggcaacatcgtactcggagcagcgattacagtcgcatgtttaacaacaagcatcggccttgtcacatcttgcggccaatatttttcaaaacttattccggcattatcatataaaattgtcgttacgattgtcacgttattcagcttgatcattgcgaattttggactcgcgcaaattatcgcgttttctgttcctattttatcagctatctatccgcttgccattgtcattatcgttctttccttcatcgataagatctttaaagaaagacgcgaagtgtacatcgcatgcttgatcggtacaggacttttcagtattttagacggtatcaaagcagccggtttctcacttggatctttagatgtgtttctaaatgcgaatcttcctctttacagcctcggcatcggctgggtgcttccaggaatcgtcggagcggttatcggctatgtgctgaccttattcatcggaccatccaaacagcttaatgaaataagttaatgtcacagaacgcctgcgttattgcgcaggcgttttgtaataagaaaaagagcctgctcattacactgcgggctctttttcatggtcgtgattatctaagcggatatgtcagctttgattttttcaactgcacctggcgcagccttttctacagcggtagctgcaatttcataagagtcgtcataatcaaaagcataaaaacgtctttccgcttctttcagctgttcagataaaatatgattctggcttctgaaccggtttccgaactgaatgattttttcaatgaggatgacctgctcgacaagttcctctgattcccggcttgccctgttgacgatatcttctgcttgtttcaaatgggctccggcttcttccatatttaatggaagttcgtttagttgattgaccgtttcttgaatatgatgatgcgcgttctccagcatctcttgaatatggctcggaatgcctggaatgttgctagtcttcagcagtcttgctgtctcagaaattgtttttttcaaattgctgagcgtctccctcgcctgaagctcttcttttctcagcgcttgcagattttcacgatactcgtcatgctcttttttcacttcttcaatttgcttctctattgaagcaacttcttccactaaaagtgagtaggcaacatgctctgcatcgagcttatctttaacggatgatagcagcttcccaatttcatcaaggcgcttttcaaaagcctgctgtttgccgagctcaccggctgtcagcctgtagctttccttcaccagctcagtttccgccttcgtatgctctttctcttctttaagcttgtcgtaagcaataatcaattcaggcattttgcttagtacggattgaccggcttcaacttcgccctccagctgctgataaacagattgaatattttcgtcaatgagctgcaggattgcggacgcttcatcaatatccagctcagtcatcaggacatgttccgctcgtttcagctggtttgacagattttctaattccttatcaagctggatatgctcaagcttgtaccctttttctttcatttcgccatagccatccttgagctttgcaatctgtccgggcaccgtctgtttacagtcagctaacagcttcggcacatcatctatgtatgactgaagccgttcaagattgcggtcctgctcaagcagtacttttcttgcagtaatatagtttccgccttctgtttcttcttcaaattgtttgatgccgctccaaatttcgtccagatccttttcaaggctgtcataaagctccccgtaaaggtggctgtaagccagcaggttttttcgagatttcgaatagcgctccctcacctgttcaatctcttcacggctcttttcctcacttgtgacaagatcgctgatttcccgaagaatcttttcaatgcttgattcagccgctgtcagcaggtcgtcgatatgaacgagcacttgattggcctttttaaaccggtatttgtctgcattttcctcggcatcataaaggagctcttcaactttcggcatgtgggctgtgacaatctcatcccattcttcacgccacttctcaaagaactcttctgtctgacccgtcatttttaaatgttttattttagacatttcttccacgatcgaccgatttagaatttcaatcttccacgattccagccggtcgatttcggcgtagacttttttcctgaaaaagtagcctgccgcaaacagcgcaagcagtacaattaataatccaatgacaaactccataatgagcccccttgctgtttaccttaatctgtcagggtgttttatttattcagaaagatttcaggatatgtattgagaaaaactgtcgttttcattgttattatgataccatgtaacaaacattttttgaccagaaatcaaaaactttttgtgcaaaatcggcaggatttgactattttttcatggggtgacatcaatgcaaaagcgagacggacatattcacacaccattttgccctcacggctccaatgacacactcagacaatatgcagaagaagccttaaaaaaagggttcgaatcgattacttttaccgaacacgccccattgccgccctcttttaccgatcccacgccgctgaaagacagcgcgatggcgcaagcttctttggaacgctatattcatgaaatttccggattaaaaaaagaatatcgcggacagcttagtatacggacagggcttgaagtcgattatatcgctgaatttgaagacgaaattacattattcctggacacatacgggccatatttagatgacagcatcttatccgttcattttttgcgcacagactcttcctatctatgccttgattatgacgagcataccttcaaagagctgatttcagcctgcggaagcattgaagcggtatatgaacaatattaccggagtatctattcttccattgtagcatctctcggcgtttataagccaaaaagagtcggtcacatcacactcgtccaaaaattcatcaagctgtttccatacagcatgtcagaacatattcgcggcctcgtttccctgtgcctgaatgccattgaagaaaacggaatggagctcgacttcaatacttccggcttaagaaaaacttacgctggcggtatttatatcgaggattggatgctgaatgaagcgaagcaaaagaagatcccgcttgtgtttgggtcagatgcccatcaagcgggagatgtcggatatgcgtatgaggcgtttttggaacggtgctagttggtgagcgccacgtctcctgtccggaagacgcttctgatccaaatcttgatttcttcaaaatacattttataaaaatacggctcgtgcggctgcatgtagagtacttctgaaatatattgaggctggagatagggcatcatcaagagagattttaattggagaataaaatgaggcagcggcagcgttaaatattcacgctgtttttctccttcctcaatgatcagctggaagatatacttttccttcattagatatgtcgacataatttccctgattaatgtggagtcaattgtgacttcccggtagacaaaacgagttaattgacgatgattatgctgataggataaaatatcgaaaaccaattgaagaagctgttcctgagtgctttgagaagagatattgcttgccgctgtttcaagcgttttgctgtagccctcgtaaaactctgaaactaagtgttccatcaagcctcctttgcctttaaaatagtaggagatgtgcgcaacatttacatcagctgactttgcgatttcacggacagacgtgccagaaaatcctttttggttaaaaagcatgacagcagattcaataattttgtctttggtgcttactttcatacggctcactccttcctcttgatactattcaagcagaaagccgctgttcctgtaagaacttatcgacaaatgccggcagaaaagccggaactttgttttatattatagaaaaagtgagggttttccatgttccatgtcgaaaaacaatctggagataaagaaaaaggctatcagcttctgctaaaacagctcgaagccatgaccgaagacgaaacagatcaaatagctaactatgcaaatgcctcagcactgctgtatcattcgctgcctgaagtcaactgggcgggtttctattttgccaaagaagaggatggacagcttttgttaggtccgttccaaggcctgccggcatgtgttcggattcctttcggcagaggggtttgcggcacagcgtacgcaaacggaaaagtggaacgtgttgaggatgtaaactcgtttccgggacatatcgcctgcgatgcagcgtctcaatcagaaattgtgcttccgattcgtgtagacggaaaaattgtcggcgtcttggacatcgacagcccagtgaaaaaccgtttcgacgaaattgatgaaaaatacttaactcaatttgccgaaacgctagaaaaagcgttagcgcagtaatataaaagcccaaaactgatatcgttttgggctttttttattttattgagtcatgaaccatcaagcggtttttcccgctccgtttcgcgctgtagagcgcttcatctgcctcatgcacaagctctttcagcgacttttttgtttctgtcgtccagcaggagataccgcaggaaatggttacctcgggtttcgtattttttctgaccgcgtaaaccagtcgctcggtaatccgtttccccactgcaaccggcacatttggcaaataaatcgccagctcctctcctccccagcgggcaccgacatcatgctttcggatgttgcttttaatcactgaagcgacttgaattaaaatctcgtccccagtctgatggccgtacgtatcatttacatttttaaaattatcaatatcaacaagaataaaaacacccttttgatggattttcatgctgtattgaattttttcatctaaatacgctcgtgaatacagttcagtcagctgatctgttttcacgagatgctcaaggcggtcgcgaagcattgaattggttacagccagtgtcgcgtgatgaatcagcgcctgaaacagcttgtacatttcaaatgtaaaagcgtacagctcctgtttcaataaaaccgcaaagcctaaaagccggtcgttttgaatcatcggagcagccatcagcgagccgtaccccgccttcccaaaaacagactggccattcccgatgaaaacccctttttcaccttcatacagcttttctttcagctcattataaaaatctgacggcttcgcttctttaaaaaatgctgtgctgcctgggagcaatgttaggttttcaaaatggtctatatgaaaaaatcccacttcttctgcctgaaacgattctgccattctcacagccagatcattcattgtatcagtcaatgtcagccgctgattcaggcgtcgtgatgtttcattaatcaattccaaatttgcgatgcttgctttggattgttcgtagagctgggcattttcaaacgcttttcccgcggcgtttgctaacagcgacatttcatcaaggcaggcatcagtaagaaagctgtcacccgttccttcagccttcaacaccccgtatgtgccctgctgtcctttgatcggaatataggcgacagattcatttttccgcaaaatgtctccggacaaatacactttgagcgcaaaggaatcggatttttccccttccatatatagctcttttgcaggaatccctaaacattggtcttgatcgtgcgatataaataaagaaaactcaaaaagagaaaatgtgcttgtcaagctttctaaaagctgcttcagcacatctgtctgatcaagcagtgaatggaacagctctgtcattttgtatatctttttttggtagatcgttttgttatagagtctttcctgtttcatcgactggtttaaaaatgaagcaaccacgtccggaagcccttcaggaatctcttcatcctgcctgcatgcaagatggaaacgcctgccggagccgtcctcaatcagataacatgaagcgtttatttttgaagcggaaaaacgcgcttcaccatctgccagttttgtcacaaagtctgatggtgacggtgtaagcgaaacacacagggttgaaaaataggtttgaatagccgaagtcagccatatgaaagagtcggtgaatgtgactttttcagatttggttaataaaaaatcgagcatatgataatgaaaggcggataattgatctttagtttgttctaccatgtttttatcacctaaaagtttaccactaatttttgtttattatatcataaacggtaaagcaataatggaggaatggttgacttcaaaacaaataaattatataatgacctttgtgtgaaatattgcagcctttttgttcagcttctatgttttcattttgttccttatcaataaggtgtatcgtgtaactctctgctgctggagcgaggatacatgaaaacaaaatgtgcatggtcgaatagagcagacggtttttattttccacaaaaataaaaccaaaggaggagtcacattatggctcgctatacaggtccatcttggaaactgtcccgccgtctaggaatctctcttagcggtacaggaaaagaattagaaaaacgcccttacgctccaggtccacacggcccaggacaacgtaaaaaattatcagaatacggtttgcaattgcaagaaaagcaaaagcttcgtcacatgtacggtgtaaacgaacgtcaattccgcactttgtttgacaaagctggcaaactagctggtaaacacggtgaaaacttcatgattcttttagattctcgtcttgataacgttgtgtacaagctaggtttagcacgtactcgccgtcaagctcgccaattggttaaccacggtcacattcttgtagacggaagccgcgttgacatcccgtcttacctagtgaaacctggtcaaacaatcggtgttcgcgaaaaatcaagaaacctttctatcatcaaagaatctgttgaagtgaacaacttcgttcctgaataccttactttcgacgctgaaaagcttgaaggtactttcactcgtcttcctgagcgttctgaacttgctccggaaattaacgaagcgcttatcgttgagttctactctcgttaatcgttttaaaaacccctgccgctatgcggtcggggtttttttatcgtctgtttcgtcattcgcctcttgctggccaacactttcttgcgcctgctgctcccaatgatcccgctgcagccgttcttttgcaatcgtacacatgagattcacgctttagcgctcctttcatttaaaaggtggtgattggtcgtgtttgccctatctaatatactcttttcctttcattcctatgcggtaaacaaaaagatcctttgccttcagtggcaaaggatctttttcttatttatacgtcacaaggaagtattttttcttcccgcggcgcagaacagtaaattgatcttcgatgcggtcttcacctgatagggtataatttatttccgtctggcgttcaccgttaatgtaaacagctccgttttgaatgtcttcacgcgcttggcgtttagaaggagataatttagattgcaccaacacatctacaagtgaaagctcttgggtgctgtcaacttccatagaaggaacatctttaaagcctacttttacgtcttgagcagaaagctctttaatattgccgctgaacagcgcttgggagatgttgatggcttgctctagcgcctcgcgtccgtgaacaagtgatgtcacttcttccgccaggcgtttttgcgcttcacgtttttctggcgccgtttctgttttttcagcgtatgcttcaatttcctcttttgaaaggaacgtaaagtatttcaagtatttgacaacgtcacggtcgtctgtgttgatccagaattgatagaattcatatggcgatgttttttctttatcaagccagatcgcgccgccttccgtttttccgaacttcgtgccgtctgcttttgtgacaagcggaatcgttaggccgaacgcttttgctccttcttcttctgattttctgatcagttcaagacccgctgtgatattgccccactgatcgcttccgccgatttgcagtttacagtttttgtctctgtaaagatttaagaaatcataagattgaagaatcatgtagctaaattccgtgtacgagatgccggattcaattcttgagctgaccgtatcttttgccagcatgtaattgatgccgaaatttttaccaacgtcacgaaggaaatcgatcacattcattttgccgatccagtcaaagttgttcgcgatgacagctgggttttctgctgcttcaaaatctagaaatctggacagctggtttttgattttttgggaccattcggatacgatgtcagcagtgtttaatgtacgctctgctttttttccgcttggatcaccgatgaggcccgtcgcgccgcccacaagcgcaatcggatgatgccctgcaagctgaaaacggcgaagtgttaaaataggcagcaggtgtccgatatgcaagctgtctgctgtagggtcaaagcctgagtacaagcggattttttcttcattcagctgtttatttaacccttcttcatctgtcatttgctgaatcaatccgcggaaggataagtcttcaagtaagttagtcataagataaagctcctttttgattaaaataaaaaacgccccttcgtttacacgaagggacgattgattatcgcggtaccaccctactaataagagaatgcaaacattcgtcttatcactttgcctgataacggatcaggtccgttctttcactactgaaagcctggccggctttgtttgcaaaagcggttcatgagtgtattcgatatatccgtctgtgctgattttcaccggccatcagctctctggaacgtaaggatattctacttgtctcaatctttaccttttcatatgaagctatatcatttttaacataaataaaatcctgtgtcaacgccgccttttaatcctccattgttgacagatctccagccggcagattaagctcccatgccttcagcacgcgcctcatgatctttccgcttcgggttttcggaagcttatctttaaattcgatctcacgcggagccgcatgggctgcaagaccctgctttacaaataggcggatctcttctttcagtttatcagacggctcaaatccttccctgagtgcaataaaggctttaatgatttctccacgcaccgggtcaggctttccgattacgcctgcttctgcaatagccggatgttcgacaagcttgctttccacttcaaatgggccgacgcgctcaccggaggtcatgatgacgtcatcaactctgccttggaaccaaaagtatccctcttcatccatgtaagcagaatccccagacacataccagccgcccggcatgaaatacgattcatacttttcagggttattccaaatggtatgcatcatggaaggccagccctttttgatggcgagattgcccattcggtacggcggaagctcgttgccttgattgtcaacgatcgctgcctccactcctggaatcggcttacccattgaacccggtttaatatccatgcaaggatagttgcagataagctgactgcccgtttctgtcatccaccatgtatcatgaattcgtttgttaaaaactttatgtccccatctgatgacttccggatttagcggctcaccgacactgagcacatgccggagtgaagttagatcatatttcgcagccatttcatctcccgctcccatcagcatccgaaaagctgtcggcgcgctgtaccagacattgacgccaagctgttcaatcgtaccataccagctttccgggctgaaacgtccaccgacgatgacatttgtcgctccgttcagccacggtgcaaaaatgccgtataccgtacctgtcacccagcctggatcagccgtgcaccaataaatgtcttcttcctttaaatcaaggacccactttcctgtttgatattgctgaatcatcgcttcatggatatgcagcacgccctttggcgtaccagtggaacctgatgtatagtgaagcagaaagccgtcttttttatccatccattcgatatccagtcttgtgctttcctgtttcgctgcttcatcataattgatgatattcgtgccgctctcagcctctcccccgactacgaagacatgctgcaagtgaggcagtttgtctaccggtattctctccagcagctcaggtgttgtgacaacaacctttgcctcactgttttcaagccgatctttcaccgctccctccataaatgcttcgaacagcggcccggcgatggcgccaattttgattgcgccaagcataataaaataaagctcgggtgatctcggcataaaaataaaaacgcggtcccctttttccacatttccataccgtctcagcacattcccggctctgtttgattcttccttcatttctttaaatgtgtatttttcatcccgttttgcgtctttataataaagcgctactttgttttttcgaaacgattcggcatggcggtcaatcgcttcatacgccgcattcagtttccctgtctcatgccaagagaaatgtttctctgcctcggcccaatcaaaatgccggtacgtttcttcatagttttttaagttatgatccccctctattgctggtaacgctttcaaattcatgcccaaacatccccctttgctgaagttgtcacaattattatagtatatattcatattcttctcaatttttaaaatataaaccaggttgaaaacgctttataatttggtattcttaaagaaggcatgtatttttgataagaattgatgggacggtgaattagtggaacatcataaaacataccattcagcaaacatcaaaacagcaaccggctctttactgatagaagggcctgtctctccagaggatttggcaggttatgagtttcataaagatttaaccgcatttcgcccgcctcgcgagcagcatgaagcgctagtcgacattgcaggccttcccgaagggcgcattattattgccagagacggccgaaccattgtcggctatgtcacgtatttatatcctgacccgctcgaaagatggtctgaaggaaatatggaggatttgattgagctcggagccatcgaagtagcgccggactatcggggatgcgctgtcggaaagacgctcctgaccgtcagcatgatggatgaacaaatggaaaactacattgtgatgacgacagaatattactggcattgggatttaaaagggatgaaaaaagatgtgtgggaatacagaaagatcatggaaaagatgatgaatgcaggcggattggtctggtttgcaacggatgagccggagatcagctcccaccctgcaaactgtctgatggcccgcattggaaaaaacgtcagccaagaatcaattgagcaatttgacaggctccgtttttatcatcgttatatgtattaactgacactgacaaaggggaaaaaataatgattgttgagcaaatcatgaaaagagatgtcattacattaacgaagacagatacgcttgaaacagccatatgcaaactgaaggaattccatatcagacatctgcctgttgtagatgaagaacgacacgtgatcggcatgattacagacagagacatgaaacaggccagcccgagtatttttgaagaaaacaaacgaagcctatttctcacacgaagcgtagattcaattatgaaaaaggatgttgtctgcgcccacccgttagattttgtcgaagaaatatcagccgtgttctacgagcatggcatcggctgccttccagtggtgcaccatcaaaaattaataggcattttaacaaaaaccgatttgctgcggacgtttgtcaaattgacaggcgctgaccagccgggatcgcaaattgagataaaagtaaacgacatcaccaaaagcctcgctgagatcagcagtctttgccaagaccttcaagtgaaaatattaagcgtgcttgtttatccgcatgacgatcccggtgtaaaagtgcttgtcttccgtgtaaaaacgatgaatccgctgccgtttttgcaggcattacaaagaaatggacaccacgtcgtatggccgtcagagcaaagggatctgctatgagagacagtgtatttatctattctccatcctaccaaacctatatgtttcatcaggagcatccctttaatcagcagcgggttctgttaacatatgatttgcttaagacgatcaatgcctttgatgatggagacattgtcacccccagactcgcttcagaagaggagctttcccttgtccacacggacgattacattcaggccgtaaagcttgcgggcgccggaaagcttcccgctgaagaaggagaaagctacgggctcggcactgaagacacacccgtctttgccggcatgcacgaagcggcatcactcttggtcggcggcactttaacggccgcagactgggtcatgtcaggacaagccctgcatgcggcaaaccttggcggagggcttcatcacggctttcgcgggagagcatcaggattctgcatatacaacgacagcgctgtggctattcaatatatccagaaaaaatatagcgccagagtgctttatattgatacggacgcccaccacggggacggtgtgcaatttacattttacgataatcctgacgtatgcacgctgtccattcatgaaacaggaaggtatttattccctggaaccggccagatccaagaaaaaggcagcggaaaaggatatggctattcctttaatattccgattgacgcttttacagaggatgattcttttcttgaggcttaccggacagcagcttcagaagtcgccgcgtatttcgagcccgatgtcattatcagccaaaacggcgccgatgcccattactacgacccgctgacgcatttatcagcaacaatcaatatatacgaagaaatcccccgtcttgcacacactttggctcatcaatattgcggagggaaatggattgcagtcggaggcggcggatatgatatttggcgtgtcgttccccgcgcctgggccagaatatggcttgaaatgaagggaattgacccgggatacgagataccgccggaatggattgctaaatggcaaaaacaatgccccgtggcccttccgtcgagctggagcgatccggctgatttatatcctccgattccccgcaagcctgaaatcacagaaaaaaatgcccaaactgtcagcaaagcattatatgcgatacgctctgaacagcaaagaacaaagtaaaaaacgacctttacgaagaggtcgtttttgattttttgatcactatttccacacgccgattttccttcatgtgttcatttgtcttgttatccttcaccggctttgtatccgcataaccgacagcaataaagcgcttggagggaagcttctcttttgacgtgaagtattgaatcactccacttgcccgtgctgctgatagctcccaattcgacgggtatcggtatgtcgaaatgtttcggctgtctgtatgcccctccacctgaatgtcatttggaatggtttgaagaagaacggcaatttggtgaagaagtgtttcggcatttttcagcacctttgcctcacctgtatcaaacagcacagcctcctgaagaacgagcacgacaccgcgttcatcccgtttggctgtcatttgggccttcaaatgattgtcttttatatatgtatttactttcttgagaagctgatcctgctgatcctcttgcttcttcgtatcagatggggatgtattctttttttctatggatgtttggtccggctgaagcccgttgccttccttctggatcgagtccactgcagctttgaatttttgcagatcgatttgggacatcgaaaagagtaaaataaagaacacaaggatcaaggtgatcagatctgtaaaggttaccatccagctggatgaagattgactgttttttccgcttccattccttctgtcaaaacgttctcttctaagcttcatgtacagatcccttttttgtttttacttgttttggctgcttcttccattcttcccgtgagctgaaaacgaccagctggctttcaaggttgcgcgggttttttccggattgaacaccgataatcccttccaccattacctgcttgatgaaaatttcactttctgttttctcttcaagcttagccgcgatcgggttgaagaccatatttgccagtaatgaaccatataaagtcgtcagaagcgcaatggccatgtttggtccgagcatatgcgggtcgtttaagtttttgagcatcagcacaagcccgacgagtgttccgatcattccccatgccggagcgaattctcccgctttttcaaaaactcgccgcccttttcggtgccgttcctccattgctgcgatttctgaatccatgacgagccgaatcgtttcttcatcccagccgtcaatcgctaaaagcagcccttttttcaagaatggatctttgatttcccgagcctgatcatccaatgataaaagcccgtgttttcgcgcgtgatcggaaagggaaacaaaggttttcacaagatctttcacattgtcttcctggcggatgaatgcctgctttaacacagagggcgcttttttcagctctcttggcggaaaactgataaaaacagcggcgcaaagtccccctgttacgatgaagaaagaggtcagatcaagaaaagagcggaaaccgcttactcccgatcctgaaataatcccgataacaataataatcgttcctaacacaaatccaacaggtgtaagataatcaaaacgtttcatcatttctccccatgaaaaaagcaagaattcaccataaaggtgaagcttgctctttgtttttcttatgacttggttgactttctaagctctatacggtgcggcagttcgacgatatgctcttcaaccggctctttattcatgagcttcgtcagcagtctcatcgcaacggcgccgatatcatatgtcggctgaacaactgttgaaagctgaggacgaaccatgaggcttaatcttgtattatcaaaaccgataatgtcgagatcctccggaatggataagccctgatcctgagcggcatggataatgccgagtgccatttcatcagttgcagaaagaatggctgtcggttttttatccaggctcatcagatgctgcagtgcttcgagtccggaatcatatgtgtaatccccttcagctacaaattgttcattaaacggaaggttcgcttcttcaagcgcacgtttgtagccttggagttttttcgaacggttgatcggttctgccattggtccggaaacgaacgcgatgtctgtatgtcctttatcaaccaaaagcttcacggcatcataaatcgcctgttcgtaatcgatagcgactgacggtgtttcctcctgctcttctacagaagcggcaagtacaatcggcactggagaacgcttaaattccgccacatgctcgtccgtaatgtttccgcccataaacacgatgccgtccacttgtttgccgagcattgtgtttaacaagtgcagctctttctccatgttttggtcagagttgctcaaaataatattgtatttatacattgtcgcgatatcttcaattccgcgcgcaagctctgaatagaaaatgcttgagatatcgggaatgatgacacctacagttgttgtttttttacttgccagtcctcttgccaccgcgtttggacggtaaccgagacgttcaatggcttccaagacttttttcctcgttgtcggttttacattcgggttgccgttcacgacacgggaaacggttgccatgcttacattagcttctctcgctacatcgtagatcgtaatattgctcatcctaaaaccactccttttactggatacacttatccttatctatagcataaacactttatgtagagaaatgtcataatgtccgaatttatgtcgtttatgatttgtaagcgtaagtcagtagtgtacattatttttcattattcatcaaatttaattacttctcatgaaattatacacgtttttatagatgatgaaaacgtatacttggtttttataactaaataaacgagaaagcataaaaaaaggccgcaggcgcggccttttggattgttcaattaagcgttgactttcaccattggcttcagttcattcagccatttttcgaattcaggaatcgccatttgctgagcagagtcagaaagtgcgactgacggatcagggtgaacctcagccattacgccatctgcaccaatcgctaaagcggctttagctgtcggaagcaagaggtcacggcggcctgttgaatgcgtaacatcaacaaagactggcaaatgcgtttcttgtttcaaaatcggcacagctgaaatatccagcgtgtttctcgttgctgtttcatatgttctgattccgcgctcacaaaggataatttggtcattcccttgtgacatgatgtattcagcagcattgatgaattcagagatcgttgcagcaagaccgcgcttcagaagcactggctttttcacggcgccggccgctttcagcaattcgaagttctgcatgttgcgcgctccgatttgaatgacatcaatgtagtccagcgcttcttcgatatgagccggagttacgatttcactgataaccgccagatcaaattcatccgctacacgttttaaaatttgaaggccttcaacaccaagcccttggaaatcgtatgggctcgtacgaggcttaaaggctccaccgcgcaaaattttaatcccttgttttttcgcagctgcagcgacttcagctacctgctcatagctctctactgcacatgggccgacaatgaatctttgctggccgtctccgattttttcgcctttgatatcaacaattgtatcttcaggttttttcttgcgggagacaagcagcgctttgctgtgatcttcttcctgaagctctaaaccggctttgaatatctctttaaaaatgtgctggatggttgaattttcgaacggcccgtcattgttttcaatgatattgtttaacattgtgcgttctctgacagggtcaaatcggttgacgccctgtgcttccttcgctttaccgatctcttttacaacatttccgcgttcgttgattagttttaaaatttgtaggtttaattcgtctgctttctgccttaaaagctctaactctgtgttgctcatttttttcatcctttccctgcacattcattttttattttgtagttatcatgcatcttactataagtaattccaaatggaaatactgaaatacaaaaaattttataaaaactctactttattacccaaacgcttttaagtgataaagtaatctatgaagctatcctacatgatgtgagggcaatgttcaagggttttttacaaaaaaaagcgccagatgatatctggacgcttttttctatgacaaatgctgctcaatagcggcttctgtaatttgtgaatgtgaggtatgccatttcacttcaccgttctggatgatgaatacctgagggctttcatgcttgaccccatatgtttctgcaatgaaattggacagcggccgggcttcttgtacttgaagatagtaagccggcacatcctcatgctgatttgcaaaggcatcaaactcatgaaatgctgcctggctgatcgggcatgtggtgctgtgtttaaagaagacgaaaacgccttcctgttctgcaatccgtttaaattcttcctcagattgaataagctgtttagccatgactcaagctcttccttccctgctcagcgattcaactgctcagcctgtttttgtgcatctttcagttcgtcttttacatcttctttcgtctggaggacttgatcttttgtttcatcagccgcctgcatcgcttcttccctcatatcctgcattgcagtcgatgaatccgttttgtcagatttggaacggtctctcaaatcctttaccttgttcatgatctgtccagactgatcggctacaagctgtgtgatgttggaagttttgtcttttgcgatgctgacatattgcgtgcctttttccttcgcatctgccgtcattttatcagttttgtcccgtaaggcaacagcctggctgccgagatcgtcgcgaagttctttgcctgatttaggtgctagaaaaagagctgtagtggcaccgatgattcccccgattaaagttccgattaaaaaatctttactattaattccatctttgctcatcattattcctcctcttagtatttttttctcttacagggctgattttttcttttgcttccatttctcccaaatttccattgctgcttgactccaagtgacaacttgattgatcttatcttgattttctctaactgatgccgatacagaccctgccgcttgtttcatggatgtattgaactgctgtacagaagctcccactccttgaacagcatgaacgaccgtgttcagcttttctgatttttcctgaatatcttcagccaggcggttggtcttatgtaaaagctcggctgtttcagttgtgatgcccttcatttgtccctccagcccttcaagagtggatgcgacgttttttagtgtcagctgcaatgacttcagtgttttagacaagtagatcactaatacgagaaatgcaactgcgatgagtgcaacgctcaaataaagaataataatcatctcaaacctccttgctgcaggatatactgctgtttacccgttttcttcaatcataaacatgtgtactgggctgtatacatactattctccgttatgtaagaaaatcctttaataagcttttccatcagataaataaaaagcagtgagatcactgctttttattatgccatgacgttttcgtaggctctcatatatttttggatatctcctgctcccatgaagatgagaacggctttatcatgagcttttaaaacagatgtgtcatcttcttcaatcagcttggcattatgaatttttccctggagatcgccgatcgtcagctttccggcattctcacgggctgagccgaaaatatcgcataaatacacacagtcggcgccgctcaggctttctgcaaattcgtcaaggaactgctgcgtccgtgtaaatgtatgaggctggaataccgcgacaatttcccgatcaggatacttctgtcttgccgcctcgattgtcacttttatttctgtcggatgatgggcatagtcatcaatcagcacttgatccccaagctgcttctcattgaatctgcgtttgacgcccccaaaggatttgagagcatgcttaatgatgctggaatcaatttcttcataatggcataacgcaatgaccgccaatgagtttaatacattgtggtggccgtacgcaggaatataaaacgtatcatagaacgtattgcggacaaagacatcaaaagttgtcccttccgtgctttttacgatgtttctcgcttgaaaatcattttcttcccccgtgccataatacacaaccgggacgttcgcatggattttcggcagatgctcgtcgtctccgcaggcaataatgcctttgttgacttgaagagccatctcttggaaagcgtcaaatacatcgtcaatgcttgagaagtaatcagggtgatcaaaatcaatattcgtcataatcgcgtaatctggctgatagcttaagaaatggcggcggtattcgcacgcttcaaacacaaagtattcgctgttttcatttccctggcctgttccgtctccgattaagaaagacgtcggttttgcgttttggatcacgtgagccagcagacccgtagtcgacgttttgccgtgtgcgcccgtaacggcaacactcgtgaattttttcatgtagtcgcctaaaaacttatgataacgtatcaccggaattccctcagacatcgctttttctatttcaggatgcgtgtctgggaatgcgtttccggcgatgactgtcatgccgggtttaatattctccgcgctaaaaggaagaaccgtaatatttcttttttcaagcgctgtttgcgtaaaaataaatttttcgatatccgatccttggacagtatatccattatcatgaagtatttgggcaagcggactcataccggtcccttttattccaacaaaatgataaacagtcataattgtacctccaacaaacgtctatctgttccccagtatatgacgctcatttcaatttgcgaccgcggcggctgaaaagcctcccttagcggcgtattttatatgttttgttatgtttagtatcaggttatttctttccgattaaacccagatatcaagatttgtctatgcacagctgctgtaaagcggcatagctgttaaatgctctaaacactatcataccatgtttggtgtgaaaatgaacccatattattcgtttattaaatcacttgctgtgatcagcacctcccgaggcttgcttccttttgcctcagagatcatgccttccgcttccatcatgtcgatcagccttgccgcacgattgtaaccgattctgaatcttctttgcaggcttgaagtgctcgcactgttttgctctacaacaaactcacacgcttcgtaaaacagttcgtcctcttctttcagggcagatccttgtcttacgagctcttcttgttcaaataaataggtcggcggcatttggcttctgacgtgggaaacgacgcggtcgatttcccggtctgacacaaagttaccttgcagacgaaccggttttcccgatccgttttccaaaaagagcatatccccttttccgagaagcttttctgcaccggctatgtcgataattgttcgggaatcaacctggcttgaaacagaaaaggcgattctcgttgggatattcgccttaatcagacctgtaatgacatcgactgacggacgctgagttgcgacgagaagatggataccgcacgctctggctttttgggcgatccgcgcaatgctttcttccacatcgtttggagccaccatcatcaaatctgcaagctcatcaataatgacaactaaatatggcagcttttcacccatttggtgttcagcggttaattgattaaagcggtcaatatcgcggacacctgaatgggcaaaaagctcatagcggcgctccatttcctcaacgacccatttcaaagcagctgtagccgctttggcgtcagtaatgaccgggctgacgaggtgaggaattttattgtaaggggccagctctaccattttcggatcaatcagcagcacctttacctcactcgggtcagctttataaagcaggctgactaatattgtattgatgcatacgctttttccggagcctgtagcaccggcaatcaagccatgcggcattttcttcaagtcgataacaacaggatttcctgaaatatctaatcccagcgcagctgtgagcggtgacttgcttgtcctgaaagctgagctgcgaatcatttggcgcaaatcaaccaccttgctcgtgcggttcggcacttcaattccgatcgtgtttttccccggaatcggcgcttcaatccgaatatctctcgctgagagactgagtttaatatcatcggacaagttggtgattttattcacctttacacctggttcaggatgcacttcaaatctcgtgacagacggaccctgggttacatggaccacattggcgcggacattgaagtttttcaaggttaaatcaagaagctgacgctgttcttcgatccacgcagtatcatcttgaacctgcgctggcgggacatcaagcagtgcaacattcggaaatacatagctgccgcggcgctcctctgctttttgctgtttatgcgtatctcttttcagcatcatcacattaaaaggaacggatggccctttttgagaagatgcgctttgttcagtccttttctcctgtacaccaggcctttttttcggctcttctgaagcttcgcgaggtttgtctgcgcgaattccctgccggttttcaagagttgcagtaaacgatttggaaccctgctccatgtgttcagttttctcaagctctgtatggctgtctggctgaacatctatcttcgtttcctgagcctctcccaggatgtcataatgattatttattatgctgtctgatggctcttctgattcttttgccacagtttctgcttgagccagagcctctgatgaatactcatgatcagtaaataaaggctcttcctgacgaatgtccatttgttcttcttgaacgaacggggactcagcaccttcttccgcgttttcatgatgattgtatactgggctgtctgacggctcttttgctttttcatcctcagatattgcctctgtctgagattcaggagctgtttgctcttcatcaagttcagcggagaaaacaggctcttcaaatttctctggctgctgctccctttgttcttcctcagccgttgcaggctcttcgcggcctacttcactgtctgaaagcccttcagccgccgtatctgtgagcatctcaggcggtgtttgctcttcggcatgttcagctgggaaggaaggctcctcttcttccggctgttgaacgcctgactcaaatggcactttgttacctgacggctcggctggccttttcgccagcgcctcatcattctccgtatcctttctgtttaaaacgccagaaggctgtttttcaaattgggtatccgggaagaaaggactttcttttttggaatgcgcctgtgtgtctgaagcaggatagccgcgttcacgttcgatctcttctgacagcagtgttaccttctcttttaccgatttatccggttcgttcaatgtttcagaaggctttttcggcacatcctttttaacagatggtttttgattgaatccatagacaggcgaagggatatttgtcggtttaaacggtttcttcgccggctctgctgcttgatatgtatgctgctcttcttcatttctgggacgctctctgtaaggtgcagcacttggacgaggcgcggatttcggttcgtccgatggtgtgcggcgccttctcaggtcatgatttttgtatccgtcaggcacgactggaaaacggaatttgccttttggatattcataatatattttaggatcttccaatctttttaattgtccttcaggatgatgtacttcttgttgctgcggaatttgagcgggttttgtctcccgttcagcatcctcttcgctttcgcctaaaaacaaatcaaaaaatttatgaagccaactcataatttatctctaactcccttatagttttctgggacggtttttagtataccactgctggtcggcccagaaaagattaagctatcagcagaaacaaagccgctaaacaagggcttagcggcttttcacatgattcgttttttttggcggatttatgggagtctaaaaccgaaatgcgtctcctgcctcatagtctccttctaacacaaggattcctttttcagcaggggcatccggcaaatcaagctctttcgctgagcagatcatcccgcttgacggaacgccgcgaagctctgcatccttaatgacaagtccgctaggcatcacagcaccgactttggcaacgacaactttttggccttggtcaacgttaggcgcgccgcagacgatctgaagcgtttcttctcctacgttgactttacatacgcttaatttatccgcattcggatgtttttcttttgattctacataccccacaacaaacttcggagataaatcaacgactaatgtttcttcaacgccgtttctgtttaaaatctcattcacatcttgcacgaatgtttctgagagcgcaacagggccgttttcatcaatagtcaagtaagaagacgcgttgaaaatgttgaagcccgttgtttcttttgtttcgttattgaaaattttgacgacgtcgccgtgtttttcatagcctaattgttcgcgtgtcacatcttgaagagagatcaggagcgtgtctcccacaccttctttattataaaaagcgttcataagtaaaaatcctttctaatcctttttcggacggcttttcgccaggataaacaccggttccagctttccttcattgtacaaaaatgaaagggcggtaatcgggacggtgccgcctgcaaagaagctcatcgacatttgtcctagaatatcataccccgattcattccggatgtcagcaagaatcaaaacgtcctgatgaggaacagagatcgccagctccccttctgcatgctgcttatactcatttaagatcgcttcgttcaaaatccggcttgcgtcgtatccgtcgtttgccctgaagaaataaaagtaattgccggcaaccgtatcttctttgacaaccgtcggcagggaacggagattaaatgcggccgtctctctgatccgctcttttgtccagttttctttctcaagcatgcgctggtcaattaaacggtaggttttcccgagatcaagcgcgtaataaattcttgtctctgcggtatgatcgtcataaatgagcgggatatcttcactggacttgtccgggaaggaagtcgagcggatgaccggataaatgcgagtttctttcccggtcatttcctgagccttcccttccattgccgtcatcgcttcagagacatagtacacgatctcatcaatggcttcgtcttttttcagttcccattttgcaataatcggcggcaaatcgagtgtaatcccttttttagtcgtttgatcctcaacacggagggtgtctttttctctgtcaaacagaaaggagcgattctcgtgctgaaggcgctgtttcagtatatctgacagcttccttgaggtcattttcaaaccgatgtcctcctttacgctttagcgagagagtctgttaaaaactgttcaatttcttcttttgttttgcggtctttgctcacaaaacgatttacttcttttccttcattaaacaccacaaagcttgggattccgtaaatttcccactctgcacatgtatcaatgaatttgtcacggtctacgtagtagtaggtgaattcagggaaattcgcttccaattcaggcaggaaaggctctacaaaacggcaatccgggcaccaatcggctgaaaacataaatacagaccaatcatcctttaccgctttttccagctcttgagttgattcaatttttttcatttcatatccctccagttgtttatgttcttacatgttttttatcgatactcgtccatttggatcataccaaactgcttgaggcaaaaccacttatatgcaacgaatgaatatgtaagattggctttcccattatcattatcatattttatttgcattatcaagctcgtttcgtttaacatcgtgtacatgagggtaaaatttacagatggacatacataaggagggatttttatatggagtttatcgtctatttagcaggagaaatccacagcaattggcgcgaggaaattaaagaaaaaacaaaatcactgaagctccctattacgtttgttggcccgatggagaatcatgaccgctcagacaatattggtgaagaaattatgggcgtacagccaaatgccgttttaaaggatgacaaagcctctgacatcaacaacttcagaaccgccgtcctgatgaataaagcagactttgtgatcgccctgtttggcgaaaagtacaaacagtggaacacggcaatggatgcatcatatgcgatcgcaaaaggaaaacccctgattatcatccggccagaatcgctccaccatcctttaaaagagctttccaataaagcgaatattacggttgaaaccgttaaccaagctattaaggccctttcctatctatttgaaacagaataagaaaaaagcttgtcgatccgggcttactgctcgttcaacaagcttttatgaaacctacatattttctttaatcgcatccaccgtctgcttatcgcaggctgttacaagtttgatgagcatttctttagcagcagcataatcatcaatatgaatgatagaagcgtttgtatgaatatagcgggaacatattccgataaccgctgacggcacaccgctgttcgaaatatgaaccttgcctgcgtctgttcccccgccggatacaaaatattgatatggaatatcatgcgtttcagccatatcaagaacgaattccctcattccgcgatgcatgactgtcgttctgtcaagaatgcgcagcaaaaagccttttccaagctggccgaattcatttttgtctccgctcatatcgtttgccgggctggcgtcaagggcgaaaaacaagtccggtttaatcatatgagaagccgtctgcgcgccccttagccctacttcttcctgaaccgttgcacccgcatagagtgtattcggaagctctttaccgtgtaattccttcagaagttcaatgcttaagccgcatccatatctgttatcccatgcttttgataaaattttcttttcattcgccatcgtcgtaaacggacaaacaggcacgatctgctgtcccggtttaatgccgattttgatggcgtcttccttatcatccgctccaatgtcgatcatcatgttcttgatatccatcggacggtttcgctgcgcatctgtcaataaatgcggcggtatgcttgaaatcacacccggaaccggcccgttatctgtttgaatttcaacccgctgcgcaagcaaaacctggctccaccagcctccgagcgtctggaatctgagcagcccgttgtctgtaatggatgtcaccatgaagccgacttcgtccatgtgcccggctaccataattctcggtgcgtcctctgcgcctcgtctgactccgaaaacacttcccagtctgtcctgaacgatgtcatcggcatatttggctagctcctgcttcataaaagcacgaacctgatgctcattgcccggcgcgccgggaagctgcgtcagtgtttggaaaagcgctttcgtttcttgattcatgttttcccctcatttctatgtagtccttttattttattagaaacaatgaagttttccaagcaccctgacccaatctgctcgatcagccgcgtattgcttaacaggatttggctgtttctgtataatgaaaagtacgatcaaccaggaggtgctttattttgaaattgcgtcatcttcttttaggagcaggacttggaatttgtacggctgtcgttgtgaaacaatatgtgatgaagccttatatttcttcagaaaaagcgcttcgaattgtaaagtctgcttttaagcagcggggcccgattgacggatcatggatttacacccagccggagccttacaatattaacggagaaacggtacaggtatacaaaaccggcattacacgatcagctttcggagaattagaacagtatgaagtcatggtggatgcgaaaacgggagaaattgttgatgtcattgatacaatcgcctcttaacaccggacaagcaaaaaatagaagccgctgcctacgcagcggctcttttttattatatcgcgcgaatcggtttgtataccggataccacatcgcatcctgcactgcctgtataatgtcttcaggctcttccgtagcgacgccttccttcattgcggtttttgcaacttcaacagcaacggttgccgaaacagtgcgcaaatcttcaacttttggaagcatcggcgcgccaggcaccccgacattgaccatacctgcgattgcccgggcacatgcttcaaacatgccgtcggtaattaattttgatttggtaacaatcgttccaagaccgagaccagggaagacaagcgcgttgtttgcctgcccgatatgatacgtaactccgttatattcaactggcgggaacgggcttcctgtcgtgatcagcgcacggccttctgtccattcgattaaatcctccggttttgcttcagaaagagttgtcggatttgacattggcaaaatcgccggccgtttcacatgtgacgccatttcttttacaatttcttcagtgaaagcgccggaaaccgtagatgtgccgatcaggatcgtgggtttcgcctgccggaccacttcaagaagatcaatgcctccgccgtctccgttccgctgataatccttcacttcttcagccgaacgagcatacggcttttggaaatcaagaagctgatccatatcatctgttaacagcccgtttctgtctatgcaccagaagcgcttgtatgattcttcttcactcagtccctcgcgcaccaatgcttcccgcagctgttcggcaattccgattcctgccgttcccgctccgaatataacaactctgtgatccctcagcggaactttagacgcttttgcacaggataagactgcggccaaagaaacagcgccagttccttggatatcatcattgaaggtacacactttatctttatagcgtttcaaaatgcttcgcgcgtttttcgccccgaaatcctcccaatgcagcaatgcattcggaaatgtttctctcgccagcgcaacgtagtcgtcaataaattggtcatagcgttcgccgcgcactctggaatgctggttgccgacataaagcgggtcgttcaagaggctctcctgatttgtccccgcatctaaaacaactgccagcactctgctcggatcaatgcccgcagccgctgtataaaccgccagcttgccaatagaaatcgcgattcctccgacgccccagtcaccgattcctaaaattccttccgcatcagtggcaacaattaaatcgatcgtatcgctttgatctttatactgtttaaatgcttctttcataccgtccgggtcatcgattgacagatagagccctcgtggttttctgtattcatggctgtatctctggattgccgttccaactgtcggtgtatagacaatcgggagcatttcccctaaatggtcatttaacaggcggtaaaacagcgtttcattccgatcgtgcagcgccgttaaatagacatttttgctcaaatcgtcaggctgtgcggaatattgttcatacgctcttttcgcctgatcatcaattgttaataccttgggcggcagaaagccttttaaaccaagttcttttctttcttcctcagtaaaagcaacacctttgttcaaaaaaggaacagagagcacttcaaggcctcttaatgttgtttgaatgtctccttcgtttgttactctgaattgtttcaccctgcctcttcctttctgagcataattagtactaggtttgcattattagccggaaaacatgcagggtaaacataaaaatatgctatcgcttcattcgcttaactgactttttgatacttccgtcctcctcccattgaagggcgcgatactcggcatcatggtaaaaaataaaccaagcatctttttctgctgcgaacgcctgccatttctgcttttgcgggatagaggtcatcggataatcatcgtaagccagcacccatagcggattgcggtgggcatgtgtcggcatcagatctgccatatgtacggcagtttcacccgcatcctcgcatatcaggacactgtgtccgtcgctatggcctccggtgtgatgcattgtaataccctctgtgatcgttaaggtgtcttcaaaggttttgacttggccagctacagcctcccaattttctttccaatacgtatttttcgacctgatattcggatggcgcatttcgtcccattcaacagctgatgtataaatcactgcattcggaaagacagagacgagccgttcaccttcatattccgttaaaccgcatgcatgatcaaaatgaaggtgtgtcattgcgatcacatctatatcggcaaccgttaatccgagtgcagctaatgagggtttcacattcgactcttgtgtcacgccatagtttcgtttttgtttatcagtcagcttgccgtacccaattccggcgtcaacgatgatattgagcccatccttttgaatcaaaatagggtctgtccttagttcaatctggtttttttcattgactggatattttttagaccaaagcggctttggaacgacgccgaacatggcacctccgtccatatgcgtcacgcccccgtcaagccaggtcaacgtgatattaccaattttcattgtttccattttcatcccccctgtcatcatggtagcaaacggcccataaaaaaaacagactcctgtcagagtctgtctttacgttctccattcaacctcagcccgatagatcggctggccgagtgcagagaatttttcttcatattctgtcataatattgccttccagattgctgttatgcaaatcgaggctgacgtatgtcagcagcaggccgtactcagagaagctcttcaaagagtactcaaataaacctcggttgtccgttttaaaatgaatcgatccgcctttgcccattacttcttcatattttttgaggaagtgggaatatgtcaagcggcgtttttcatgccgtttcttcggccaaggatcagaaaagttcaagtagacccgtttcacttcccccggctcaaacacatccgtcagcgtgtccgcatctatattcagaagctttacattctgcgcttcgctgtcttttactttttggacggctgtcacgatgacgcttttaaataactcaataccaatataattgatgtcgggattttgtttggccataccagaaataaattggccttttcctgtaccaacctcgatatggatcggattgtcgttgccaaacactgtgttccatttccctttataatcagcaggattgctgatggcaatatctgcgttttcagccaaaaagtcatcagcccaaggcttgtggcgcattctcatatgattgacacctctatctattatttcgactaacaacataccatgaattaaaaagacccgcaagctcgtttttccagtgtatctctcttaaggccgagcgcataaaaaaagagggtcccgtctgctggaacactcctttcacatgtataaaaacgctctgttttgaacaatttaacccgtatgatactgaagggatgtgtaccgttatgggtttacattatgagcatcaagttcatttattgaaggatatcttgactgaccatcaattggactgctgcggaacagtcgcagagtacgagcagcttgagcgtgtgattaaatcactgatggcaaacaccgagcttgattcaaatttcaaaaacgtgcttgaagatgtttaccgctacagccaatcaggaatatcgtccaaatccattgactcacacatacaagagcatcagaacagcctgtctcaatgggtagagcaaatggattcgtattcctgattaatcaacaattcgtttcatgaggatatgcagctcttccattgcatcatgaaattccttatcattgccttttgctttatgccaggcaatgaaagtaattgtttcagataacacataccaagccattcgcaaccgaaggctttctgtcagctctatgccgtacatgctcagccagctctcccaagctggcttttcgacgtagtggtacagcaaaggcccgaggtccatcgccggatcagcgatcatggcgccgtcccagtcaattaaatacagctggttgtcttcagacaatagccagttattatgattgacatcacaatggcaaacgactttctcaccgaaatgcacttcatgcaggtgttcttccaaatacttgatcccttcttgaatcagcggcgaagattgctgcacagcaaatacagcctgcttcagctgagacaaaagagcccccgggttcagcggttcttttccaagtctcttcagcatgtccagcaaggcttttgatgtgtgtattttacgaagcaattcagcaacgggccgtccgctcatgtctttaggcttcagctctctgccggtcatccagtgctgggccgtaatgacgtccccattttccatccgttttgtccaaaccagcttcggaacaatgccttcggcggataaaacagctaaaaaaggtgagctattacgttttaaaaaaagctgctgcccgttatgtttcgcataatatgcatctcctgtagctcctccggcggggaagatctcccaatcgctacctagtaattgtcccaaccagttcatatcaatgttcaacccatcatttcttaaaatattttagaattaaggctaatcgtttctagtctatccagcgaatgcctttttcgtacgaatcgtataaaaataaaaaagacagctattgagagtctcatatgctaatcaatagccgtcctttaaattttagcgctatagcacaaacttcgtcaagcaaaactcttaagatctgatgctaaatataagataaccgttccgatgccgtttactgcaaccgttttcttgatttctgccgggtcttcctgaaatcctgatggatcacataaaagccgataaggtatgtcgtttggcagcctccactcgacggagtctggactcgcgtgatggataacaatgatatctttccattcgtcaacctcgtcaagatcataaagcctgtatgcgataaggtgttcttttagcgtcaagcattcaagatggcgccggatgtctgcagcggacctaagacggaatgcaggatgcgcttttctcagcgagatcagcctgcggatatagtgaacatcttctttgaatgtttcgcggcgatcccagtcgagctggttgatgctgtcactggattgatagctgttttccactccctgcttcgtccggaaaaattcctgaccgctgtgaataaacggcaccccttgggcaagcaaaataatcgcggctgcaagcctttgcctgcttcgctttcggctgtcattttcttgaggaagcgcgaagctcattttatcccaaaaggtgtgattgtcgtgtgattcgacataattgatggactggcttggttccggaacaatcggtgctaatgccttccatccggaagacccggcaattccatgcatcacagcttgtgctgattcactgctgccgagcgcaaaccctgctgccttaaggtgaaaggtgttcccttttacagcgtcacgaaacatatcattaaaaaagccgatgcccggcattcttggcgcgttcgccaaagcagctttctgttcatgcggcagcggtgtagccagatcccacccttctccaaaaagcaggattccgggctttgccttagttgctttctctttcatataaagcacggtgtcaatatctaaaatcccgaggagatcaaagcggaagccgtcaacgttgtattcttcaagccaatagaccacgcaatccgcaatgaactttcttgccatccttctttctgatgcgatatcattgccaacgccggtgccgtttgatggcatcccacattcgtcgtgccggaaaaaataacctggcactgtcttttcaaagggggaattctccctcttatacacatggttaaaaacaacatccagaatgactcgcagaccgtgctgatgcagggtattgatcatttgtttcagctctgtttttctcgtttgaggatcatgagggtttgaggcatagcttccctccggggcaaagaaatgaagcgggttatatccccaattgtatgcatcaagcggcttctcttcatcaactccggcaaaatcgttcaccggctgcaactctacatgagtaacaccgagctcttttatatacgccagtcccgaagaactgccgtttgcggtttgtgtatccgtttccgtcagcgctaagtattttcccttgtttatcatgccgctgttttcatggatggagaagtcgcgaaggtgcgtctcatagatgacggcatccacagggtgtgagaatggtttaagaggagcagtccatttcatttgatccgggcgcaagacgacgcccttctctccatttacagtcacagccttggcatacgggtcaactgtttccatccattctaaattgttgcagatgcaaaacaaatactcatacccgtgaaggtcacccgtgaccgtaacagcatagacacccttttccaagcgattcatttggaatgtgcgcccgcttttattggggtgtgaaagcttgacagcagctgaggttgcagcaggcgcccatactttaaatacggtatgatccgcggtataaacggcgcccagctctccgtcataataaaattcgtcatcaaacgcagccgtccggatgaccgcgccaatttggagatccgttttgtggccgctggatgctctgacgcaatggatttttccaaatgtcacaggatggtcggatacgcagacgtacttgtattttgcttcaagggagtattcctccctgacagccagaggaaaaactgttgtttctgtctcaagccgaaacggcggtgtcatgatttccttttgttcagcaggaatcagaacagtaatgatattcatatcatcgacatacgcttcgaagctgcggcggatgctgaccatcggaagctctctcctccaaacacgtttatgttttgatccttaggggtgaaggactagatgccagacgaaacggggtagtgcccatgatttctccgtcagcatggaacgggattttgtccttcgtgtaaaatgtaatgtccttcgctttaaacatcgtaacgccatccatctttgtatgttttccaaatgccatgagacataaaagccaatattttttcaaaaacggctggttttcaacgattacgatatcaaatgtcttctcgcgcggatttgctaggggcgccgccttcatgcctcccccgtaaaacggatggttggatacaacggcaaaccagacatcatgaaattcgcgcgtctcgtcttccgtcgtacaagctaacgtaaacggcttaaaggttgccgaagcgtgcaaatgagaaagcggatacacaagaaatcgaaggcggagaaaaagaaaaacccgtctcaacggaaattccatcgcctttttattgacatatgcgtcaaacccgatcccgatgtgattcataaaataaagaatctgtgatttatcctgaaggaaattgacgctccctaaatgaaaggttcttgttaacgggcgctttaccttcttgatttcctgtatcagatcgatttttttaatagagaaccctcgcgaaaaatcattatacgcgcccgccggcacaaagctcagctcaatatcgtcaacatctttcagcccgttgacaacttcatgcatggttccgtctccgccaatgacgatcaggcgcttcagcttatattcctgtatcgttgaaatctgtctggcgagcacctcggcgtgtcccggatgttcagttaaaaatgaacggtgctcaacctttcgtttgatcaattctttttgaatggacttccaaacacgcaggccgtttcgatgtcctgctgtcggattaataataaaaaaccaatggctcatctttctcacctgcttatgttatgagaaaaccgctcaaatcgttctcttttactccagccactcctgtctgcgataggagtcagacatgcagtaagacaatagagcctttgcagcctttacctgatgatgtttgatcggagcagtgtttttcttctgccgctcaatccattcttccgcgctccgcttatccgctatttctaagccgtatggcggctccgggtaatcgatgtacgacgttctgctcagaagcaattttcgaaccggaatctcagcctgtttttcctttacgatctttgacacaaccgagtccgtacgaaacaggctaagccctggatttaacactgatgcagtctgagaggctgttttcttgtcccaaaaacgatttttagaccctatgtagacactgtcttcctcagcctctaaaaaagaaacgcaataaatttccagaggagaaataatcacaatgcttaattcaaccgccgcctgctgaattttcagcacaggcttatacataataaaataagaatcaggcagctgctgggtcagataacgcaaaatgcggtcctgcttcacttggtttgagagttgagatatttctgaaagagtagagcttgcccatttgagctgaaaatcatataaatgccttttataaaaagaagcaagcgccaccctgctcttcgggagccttacatgaatatcttcttcgtcctcaaaccattggtgtctctcttcttgtatatcggcttttatctcttcttttcttcttttcaatgaaaatttttttcgtttctgcaccggttccggttcttcagcactggcttgcctttcttcatgctggcgctccgctgcttctactagtgaaagccagcgctcttttttcaaacgtacaaactggttgatataatggtacggatcaagctcatatctcgatatataatcatgaattttgatgatttgtgccatgtttgtttctccactccgcaatgaattaagataattgaaatttgaatatttcctcgtattttggtgattggttcaagtgtatttgaaagagcgaaaatcgttcagccatcatcgaaacctcgccgctttcaaacggaacatgagctggaaatccattttcgcctgtccattttcttgccagcgtcatatgaggatgatacggtcttttttccacttgaaagccggcctgaaggacagcctgcttcgtatgttcccgcagtctatcaagcgttttgtttttctttggctccagatgtaaaacgcgcggccttctgcggtcgccgaatacatctatcttgtcaaactcaattgaaaatgggtcaatttctgaagcaatctctgctagcgaaccttcaagcttctttatttgtgtctcatccgccgctccgagaaaaattaacgtgatatgatagtcaagcgggtgcacccatttttgaaacgtcaataccggttcgtttttcgcagcctggtagatcggatttgcaattccctcaggtatgggaacgccgatgaaataatgaggccgtatatctggcatccgtctgacactcccttctttgacagctattattttatcaataaagaggctgtgcggatagaggaacagtgtatgaaaacactctcgcacaaacgtttattatgttaggatattatatgacacttgttttattcagaaaggaatgacaatgttgaaaatcgttgcaaacacagctgatctgataggagatacaccgctagtgagattgaatcggcttcagccggaaaatgcggcacaagtctatttaaagcttgaatttttcaatccgagcggcagtgtgaaagacagagccgcttatcaaatgatcatagaagctgaacaaaacggtttactcaagccgggatcagttattatagagccgacaagcggaaataccggcatcgggctcgccatgaatgcggcagcacgcggatataaagcaatcttagtgatgcctgatacgatgacgaaggaacggatcaacctgcttaaagcttacggcgcagaggttgtattaactcccggagaggaaagaatgccgggcagcatcaaaaaagcgaaggagcttgccgaacaaattccgaacagctatattccaatgcagttcgataacactgccaatcctgatgcgcaccggaaaacaacagcgcctgaaatcgcccgggcaatagaggaaatcggaaaaccgctcggcgcttttgtcgcctcctctggaacgggcggaaccattaccggaacaggtgaggcgctcaaagagctttttccggatatcacggttcatgttgttgagccagcgggttcgcctgtattatccggcggaaaacctggcgcgcataaacttgtaggaacgagcccaggctttataccgccgattttaaatgaggacgtttatgatgaaattatcaaaatctctgatgaagacgcgtatacgacgacaagacggcttgctgctgaagaaggaattcttgtcggtccttcatcaggcgctgcctgcttcgcggcaatcgaaacagcgaaacgcctctctcctgacaaagttgtggtctgcatgacagctgatacaggagaacggtacttatcaactgatttatggtcatttatttaaaaaaaggactggcttcagcagaagccggtccttttattttgcaagctcgtaaatggcctgagcatataacgctgtcgatctcagcaggtcatcaatttcgatatattcatccttttggtgtgcgctgtcagggcgtccggggaacagcgggccgaacgcgacaccggcttttaaggatctcgcatatgtccccccgccgattgagattaagtcagcttttttacccagctggccttcataaaccttttgcagggttttgactaacggatgatctgcggacacgtgatgcggcttgctgtctttgaattctcccagatcaaattcagatgcactttcgaatgcatcgcgaatcgctttgctttctgctgtcacaggatagcggatattgatcccgagctcgcctccttgcccttctttatagcgcagtgtgccgacatttaatgtcagctcaccgctgatttcatcctcacagtcgatgtccagtttttttcctcttgtatcacctgagaacttatctgtcacaacttgcacaaaccgctttcctgcatcgtcaagctcagtctgctggagaaattcgcacaataaaatgccggcattgatcccattgttcggttccatcgcatggcaggaaagaccgtacatacgcaaaatgagctgaccgttctctattgcagcttcccctttttggtccgtcgtgcggagcatgtctttaaatgaagacagaatctcttcttttttcggcccttcaatgacagcttccgcagcgtcgggcaccatgtttaagcgaaggcctgattgaaacgagacaagcactgcctttggttctgcttgatttgggcggtgcggtataagtaaagaagcatcgatgatccctttttccgcattaatgattggaaaatcggcgtcaggcgcaaagcccattgttggcatttcttcatgcttgaaataatgctctacgcatctccaatcactttcttcatctgttccgataatcattctgactcgcttggacaggggcaaattcatgtctttcacgattttcagcgcgtagaatgccgccattgtcgggcctttgtcatcaatggcgccccttgcataaatccgtccgttgcggatttcagctgaaaatggatcactcgtccatccatctcccggcggcacgacgtcaacatggcaaagtacgccgataatgtcatcgccctccccccattcaatatgacctgcgaagccgtcaagattttttgttgtaaagccttctttttctccaagctccagcaatgaagtcaggctggcatttaccccttctccaaacggtttaccgggtccggcggttgtttcgtccatgacactgttgattctcaaaaattcctgcgtatcacgaattaaatcctctttttttctgatcacttcaacttcccagttcataatgatcccctttccgcaagaaatgacttgcaaaaaccaaataaaacgaataatattaatggtgttttgttaaaacgttcgtaattggaggatactatgtttcatctaaaagagcagcaaacatccataaagcaagaaatcatagcagggctgacgacctttttcacaatggtctatatcgtcgtggtcaatccggtcattctggctaacgccggggttcctttcgaccaggtgttcaccgcaacgattattgcctccattgtcggaacgctgtggatggccctggcagcaaattatccgattgctattgcgcccggcatgggcttgaacgcttatttagcctttcatgtggtaagcgcaagcgatggcggcatcacgtacgcaacagctttcagcgcagtatttacagcaggggttctcttcattattctatcgttaacgcctttaagaaaacaacttatagaagcgattccaaacaatttaaaatacggaatcacaactgggatcgggctgtttattgcttttatcggtttgcgtcaagcgggcattgtggcagctgatgagtcaaacctggtcactctcggcaatctgcattcacctggtgttattttaacgctggtcggccttttgatcagcgtggtcctgatggtgctgaatgtaagcggcgctttatttatcggaatggcagctaccgctttgatcgcctttttcaccggtcagctccattttccaaagggatttatgtcgcttcctcatttgccggaaggattgatgatctcaaatccatttatcgcttttggcgatgtcattcatcacggcctgtacgctgtcgtcttttcttttctattagtcaccatttttgatacgacaggcacgatgatcggagttgccgagcaagccgggctgatgaaaaacaacaagctgccaaacgtgcgaaaagcgctgcttgctgattcaaccgcgacaacagtaggagctgttttcggcacaagtccaacgactgcatttatcgagtcttccgccggtgtcgcagctggaggaagaacggggcttacggctttgactgtcgcggtgatgtttgcggcttcaatgtttttcagtccgcttgtcagcgccttgtccggtatagccgccatcacctcgcctgctttgattatcgtcggcagcctgatgatgggttcagtttccaatatgaactggaaagagatggacgaggcatttccagcgtttctcgtcattctggccatgcctttgacatccagcatttctacaggaattgcgcttggctttatttcatatccgatcgtaaaagcggcgcggggaaaatggagagagattcatccgctcgtcatcgttttcgccattctgtttttcatccagctgtttattttataacatagaccaaaaaacccaaacgtcgccgtttgggttttttatgtaaacaataaagagacagcggccgctaaaaaacaacaggcggcaaacgcatagtgcaggatattgatacagctttttctggcccgataatattcatcactttccttatcggcgccaattaaaaaaggggcatccatgaccttgtcaaaaataagcgtcaggatataacggcaaacccctgtgtatactagcagcgcaatcaccttcagccaaattggggaaacaaatatgagaacagtgaaagctgacaatagcatgtacatctgcctcgcatactcgccattcctcagcatgactttaaaaaacaattccttatagcctgtgcagatcgttcgtcttttaaatatcctttttgaattacggtataataacggttttcttctcatcctgtcttttacttttggcattcccgcctcctgactcatcatcatcacaagtcctgcaagagcaagcctgctttttttctcttcagtcacctcagcttcaaaagccgtgaacgaagccgtctttttcaaactgcggataactgagaaaagcaaaaataaaatgccaaaaagcgcaagcaagtgccactgagtcaaaacaatcaggatagcagaaccagcaaaaaatatagctctgacaaaaatatcgccaatccatctcgaaatggagcgcggctttctgatcctgtcttgctttaaggataaaaagaatatatgaaggccaaacaaataagacaatagagcagtgctttctgcgaatgtgatgtgaacagaatgactgataaggggaaggacaataaaaaagagaagcagccatttagccagcgtgaccagaaaagaatacaaaagcgcgtaccgtttgagctgatagatgatttccttcttttgcagcaaaaacactttgtccgcttccattaaaaatgtacgaatcgagcctgtaaacatgatcagcccacacacagcgtacagccatctccactccgccacttcagaccactcataaagaaggcctcttccattcatcaaatcaatatactgatagatgacaaaagcaatcgccggcaaaacgatgtagagagcgactgtccagtcaatgaccgcatgcaacactttaaactgatacttgtaatagtcaaacagccttcgaaaaaagagcgtacgcccgttcatggccgatcaccttgaactgccttataaaaacagtcaagcaatgactgcccctctaatccggtcttgtcctgaatatcttttaacgtgccttggagaaataatgaacctttctcaatcatataaaaccggtcacagattttttccgcggtatcgagtacatgcgtgcacataagaattccggctccacgttctttttcagccttaagcatgtccacaaagcgtttcgtcgatatcggatcaaggccgataaacggttcatcaatcacatacatatccggcttagagagaaaggcctggataagcattagtttttgctgcatgcccttcgaaaaggtgacaggcagctcatgtttgacatgatcaagcgaaaacgtctgcagcaggctttgggcccgatgcgcaaattctctctcttcaatgccgtggagtgtgctgatcagatccaaatgctcccacagcgtcagttcttcgtaaaaggacggatgctccggaatatatgcaaatgaacagtcgttccaggcaatatgccctttaaaatcttctgaaaggccgagtatcgccttgattgcggtgctttttccggcgccgttagctccgatcagtccaaccagctccccttttctgacttccagaaaaacatcggtgagcactttttttcggcttgtatacccggcctgttctattgaagcttcaagcaaatttgtcaaaactcacccacctccaaaatttactacgaaacagaataaaaaaagtttctttaaccataataatattgagccgaaatacatagtaatccaacaaggatggctgcccaacgcgaattggaaaaaattaataggagttatccctagattcatcactgcaatatcgtgtataatgagggcgaattattttaacagttacagatgtctgcctttgttgctatttcgtacgcagttgatagtcgtgagttgtggttagtcaagtccatccgatcttatgatagggagtggttttttgaaaccttcaacaaaccgtatgctaactcgaatcaaatcagtttacatgtttatccaagaaaaaggtcttgtgacaacacaggaactggttgacgaattcggcattacacctagaacgattcaaagagacttaaatgtgttggcatataatgatcttgttcatagtccaagccgtggcaagtgggagacaacgagaaagaaagtaaagattacctcataaattgaaaaattacatagggccgcctgagagcggtccgatagataatagggcgaagaaactactgagccttgtttttgtgtgcttataaataaaaccccgcattcggtatgcggggtttttgtcatgcttgcggctcattgagcaaatgaagctcttcctctgtcagctcacggtattctccgggtgccagagcgggatctagggaaacgcgtcccatcgaaagccgcttcagataaaccacttcattgccgacagcctttgccatttgcttgacctgatggtattttccttctgtaattgtcaggtatatcacggtattgccactgtcgtttgttttgatttccgcttttgccagctttgttttatagccgccctctatgtagacacccgtttccaaatcggagatgtcttcccgagaaatctgtgattttaaatggacttcatacgtttttggaacatgctttttaggagaaaggagccgatgtgcgagctgcccgtcatttgtgagcagcaaaaagccctctgtatctttatcaagcctgccggctggaaatggctcaaatctcatctcctccggcgtcagcagatcgaccactgtttgctgccggctgtcctcagtcgccgacagcacgccctgcggtttattcatcataagataaatgaactctcgataatcaaccggttccccgtatacggtcacctcctgcgtatcaggatcaacgtgcgcctttacatctttggcaggtttgccgtcgatcatcacggctccagccttcacaacggctttgacttcttttctggaaccatacccgctgttggcaagcagcttatcaagtctcattcccaatctctcctttataaaagaaagcccgcagcatgcgagccctcagtttcatcatatctagttcatcagcctgcatgtctgcctttctttaagaaacctggcaaacggcggcctaaaattttctgtaaaaatcctaatcggtagccacaatacaggtagacagctccgccaacagcggccgcgatcaccacaacaatcgcagcttgcagctggccatcctgataggaaataaagaagcctaatacccactgcacgattttcacggcaatacccataatggctgataagacaagcatcaaaacagttcgtttaactagtatcttatacgaatagcctgcatggcgcttaatcatgataaacccatataaaagggaagcgatatatccaagcgccgtcgctaaaatcgctccgtcagcctgcatcagcttgatcagcggaacattcagcacaagcttgatcacgacgccgatcacaaggctgacaaccgcaaatttttgcttattgatgccctgcagaatggctgcgttgactgtaaacaaagagaacagaattgcgactggcgaataccatagcaaaatgtttgcccccagttcagggtgaaggctctctgacccgtaaaagaacgtatacgtcggtcctgacaatagagagatcccaacaacagccggaataattaaaaacaggatcgtctgcatcgtttgattaatctgctgatttaacagcttatagtttccgcttgtaaacgattcagtaatcgttggaattaatgtcagtccgaaagcagttgctagggaaaccgggatcatcacgagcttctgaacatacagggttagaatcgcaagcatgtcttggctgatggcttgatgaccggcttcaatcatcgctttgttaaacgtatttgtatcaatatagttatacaaagggatagctagtccaacaaaaacgtacggagcagcatagctgaacagctcgaaaaacattttcttgtagcttaggtttgctgtcggacccgtattcggcatcatcgccagcaggctgcccttccgtttgttccaataaatataaagcacgaccagccctccgaaggcaccgatcagcgctgcgaaggttgcatagccgacagcgatgacaaggccgccgttgaaaaccttcaaaatcaagaatgtcgcactcaatagaaagatgatgcggacaatctgttcaacgacttgggaaacagctgtcggacccatcatttggtgcccttgaaagaatccgcggacaaggctcataatcggtacgaccaatagcgctaagcttaccatgcggatgacataaacgacatgatcaattgtcaggccgttattatccttgcctcccagcgatatttccgcaaacatcggagccgatagatacagaatgaaaaaggctatcattcctgtgacgagcataaccgacatgcccgccttgagcattttcctgcttgtctcataatccccttttgaattatatttggaaacaaatttagaaacagcggccggaaagcccatcgtagcaatattcaaaaataaagtgtattggttgtatccgtattgaaataatgcaccgcctgtcgccccgaccataatgctgaagggaattaaatagaccatccccagaatccgcgatatatatgtaccgagcgttaatacaaacgtgcctcttaacagtttgcttgacatgtttcttcatcaccattttctacgaagattcaacttttctattttaccacaactgggcatttagacggtaataaatacaaaagcaatcctgtgaacattcatgtccgcggcaaaagacgtttaaggagcggctttctttcgctataatagtactgcggacggggtgtccgcacacgaaatgaaaagaaagttgatgataaagatgaaacaatatgacgtaattgtaatcggcggaggcccttcaggcttgatggctgcgattgcagcaggagaacagggcgctggcgtgttgctgatagataaaggaaataaattaggacggaaactcgcgatttccgggggcggccgctgtaatgtgacgaaccgccttcctgtggaagaaattatcaagcacatccccggcaacgggcgttttttatacagcgcgttttctgaatttaataatgaagacattatcaagttttttgaaaacctcggcattcaattgaaggaagaggatcacggccggatgttccctgtgaccgacaaagcccaaagtgtcgtagacgcgctgttaaacaggctgaagcagctccgcgtaacaatcagaacgaacgagaaaattaaatctgttttatatgaagatggacaggcagcagggattgtgacgaataatggcgaaatgatccatagccaggcagtcattatcgctgtcggcggtaaaagcgtgcctcataccggaagcacgggagacggctatgaatgggctgaagccgcgggccataccataacagagctgtttccgacagaggttcccgtcacttctggcgaaccgttcattaagcaaaaaacactccagggcttatcactaagagatgtagccgttagtgtgttaaataaaaaaggcaaaccgattatcacacataaaatggacatgctgtttacccatttcggcctctcaggacctgccattctcagatgcagccaatttgtcgtaaaagagctgaaaaaacagcctcaagtgccgatcagaatcgacttgtatccggatatcaatgaagaaacgcttttccaaaagatgtataaagaactgaaggaagcaccgaaaaaaaccattaaaaacgtgctgaagccttggatgcaggagcgctatctcctattcctgctcgaaaaaaacggcatctctccgaacgtatcgttttctgagctgccgaaggatcctttcagacaatttgtaagggactgcaagcagtttactgtcctcgcaaatggcacactgtcgcttgataaggcatttgtcacgggaggcggggtatctgtaaaagaaattgacccgaaaaaaatggcttctaaaaaaatggaggggctttatttttgcggtgaaattctggatatccacggctacacaggcggatacaacattacctccgcccttgtcacaggcaggcttgcagggctaaatgccgggcaatacgcccgttcttaatcattactctttaaatctcttgccgccaaactcacatttgaacattccccgcattcatgttagggtgagacttgttttgtttcacctgattgcggggtaattttaagagaggaatgagctgccatcgtacgaccatactaagcctgcgagcaagatataggcgtacacaaaaaattagagggtgagaaatgttgaaacatatatctagtgtattttggattgtgattgcaatcacagctgcagctgtattatggggtgttatttctcctgacagcctgcaaaatgtgtctcaatcggcacaagcatttattaccgattcatttggttggtattatcttttagttgtctctttgtttgtcgggttttgtctctttttgattttcagcccgatcggaaaaatcaaactcggaaagcctgatgaaaaaccggaattcgggttattatcatggtttgccatgctgttcagcgcaggcatgggaatcggcttagtattctacggtgcggctgaaccgatcagccattacgcaattagctctccatcaggtgaaacagaaaccccccaagccttcagagatgcactccgctatacgtttttccactggggtttgcacgcttgggccatttatgccattgtggcattatgcattgcctatttccaattccgcaaaggcgcacccgggttaatcagcagcacactgtcaccgattctcggggataaagtaaacggaccgatcggaaaggccattgactgtattgcagttttcgccactgttgtcggggtgtcaacaagtcttggtcttggcgcaacccaaattaacggcggtttgaattacctgttcggcattccgaatgcgtttatcgtccaattggttttaatcattattgtgacagtgctctttttactttctgcgtggagcggactcggaaaaggaattaagtatttaagcaacacaaacatggtattggccggattgttaatgttgtttatgctcgttgtcgggcctacagtgctgatcatgaactcatttacagattctatcggacaatacattcaaaatatcgttcaaatgagcttcagactgacaccgaacgatcctgaaaaacgcgaatggattaacagctggacgattttctattgggcatggtggatttcctggtctccatttgtcggcattttcatcgcccgtgtatccagaggccggacgatccgagaatttttaattggcgtcttggtgacaccttgtattttgacatttctatggttctccattttcggcgtatcagccatggatctccagcaaaaaggcacgttcaatgtagcaaagctgtccactgaaacgatgctgttcggaacacttgatcactatccgctgacaatggtgacatcgatccttgcattgattctgatcgcagtattctttatcacgtctgctgattcagctacattcgtgctgggcatgcagacgtcgtacggttctttaaatccggcgaattctgtgaaactcagctggggtatcattcagtccgccatggcggctgtgctcctatattccggagggcttgccgctttgcagaacacagcgattctggcagcgctgccgttttctatcgttatcctgctgatgattgcctctctctatcaatcgctctcaaaagaaagaagagagatcaaaaaagcggagaaactcgataaaccgagaagtcctagagtgaaaaaagcatattaacaaaaaagatctttccgcgcctgcggaaagatctttttatttgcgatataaaataagggcggaaaaacagtaaagctgctcgccgtctgggtcgcacgcggccgaaaccgtatatttgatatcaatcagctgctcctccgatatcccttttaaaaatgaattgatttccgtctgtaagtctttttcatgctcttcatcaaataccgctaccttcagcattttatccgctctcctttctctatcaatctattccgtttggaacagcgttatgatagagaaatgatgattatctcgtttccggataaaaagctttccgtatatgggattccctctgtggctcgccgccttgctgctccactttcagcagcacggcataaacaatgcgcatatgacagtagctgataaggctgacgctgaaaaaagggacaatgcccggcaggtacgcaagcaagaaaaaaagagcaacagtcagcgcaagcatagcaagcgtatattgcaaatacgccacactgagcaagagcgaaaatttcacatacagacgttttttccagtcaaaatggacaagcagcggaaacacataaaaaagcatggatacgaacaaaaagccaaatatcataatggcgaagcgcaggatgtgcagaaggaaatgacttggataaatgaaggccaaatcaatataaatgatcactccgatgagcgccagtacagcgccgagcagatttgaacgaaaaaattcacccttatattcctgccaaaacgttttgagcacgggaacgttgtcctgcccctgaatccacttccgcatgacagcgaataaagccgcggtcgcgggcatgatgccaaacacaccgagaccgagcaacgtaaaaaacagccacagcaagtttgtatacgcaaatctcatgatccattcgcaaaaacgcagcatccgtcccagtgagccatcatgttccatggcgccccctcctttttttgcattatacattctgcatctgaaaaagctctttcatgccgatcggcttcttttcggcaaccgagcgccacattccctcaccaaccgcgatggagtaggctccagcttcagccccggctaaaatatcatagcggcgcagcgggtcttttcctaaaaaaagatcctcaagcaaaagcggatcacctccgccatgccccccttcatttttgaccacttgtatcgtctgctttgattcaaaaagcggatagtattcgattgtctgctcaggaaaagcaaacggaattctggaaggttcgtgaaattcatttgattcaatacgcccttttgtgccgttgatcgtcagccggtagccttcatacggtgccgaaaaaataatcgagtagcttaacagtgcgccgccatcatatttgactgccgccacgtacgtatcctcgatgtcaatttcctcgtcaaaaatacacgcgtcaggcctgtatgcagtatataagctagactggtctcctgcttcgagatgatcatcttttatagaagctttagaggaacggggatgccaccttgaatagtagtggcatttttctttaacacggcacgtcccgcaaaaacgcccgtcttcttccggcaaggggttccactcactgtccggcccatagtaattcaaggcgccataagcaaatacctcttccggattttgcccgagccaccaattgacgagatcaaagtgatgtgttgatttatggacagaaaggcccccggaaaactgtctcgacctgttccagcgtttaaaatagctggcgccatgatacgtatcaatataccaatttaaatcaacggaggtgaccctgcctatttttccgtccagaatcatttcttttattttccgatgaaacgggctgtagcgatagttaaacgcgacggtgacttttccttcgcttttggcctccgcttcaagcacccgattcgcatcctgcactgttgtcaccattggtttttcagtaattacatctgtatcccactgaaggctttttacaatatatgtgacatgcgtatcgtccctgcctgccacaatgacgatatcaggctttgagacgcgcatcatctcgtcaaaagcatcttcgctaaactcaggcacgtgggccagctcgggaaatttctttttgcaaacggcaaaacgtttcggatcggcatccagcaatcccgtaatctcataatgagttgaaaaccgctccaacagcggtttgataaacatactgaatgctctgctgctcaatccgcaaaagacgatgttcttcaatatcctcacctctatcgggcttcagttagttgagaaatcagctgcagcgcttcctctgttttttcagcatacacagggataaacgccgccatatcgcgattcaatcgaaaagaatagccgttcagctgttttttccctttttcgatctgaacggcatagatcgttttttctcctgttttattattaacagttgtataaggagatgttttttcaggaggcaatccgtttaacggctgaaaattttccggatcattgtaagcttgaaacatgtcttcaggcacgatgaaaacatctccctcatgggcggtaatttcagtcagcagtttttcctgaaaagctggaaagatatcgaccttcccagcattctgctcggcggccttttttattttttcctgtacgccagcctgcatatcagaaaagagaatgacatgcattccgtccgtcctgcttgagcatgatgccaaaaagagcactgagacgatcacacacaaagccgtacgtatcctttttgtcatttccccgctgacctaaaaagaggctccagctctgtcatagctaaaataaacgcgccggctccgtgcagatcgtttttgcttctttcgcggctgacataatagtcatagaaaccggctgacgttccgacacatatgtctttgacgagaaacgcgccgtcttctgatgtttcggttttatgctgaatcaagccttgatacgcttttagcagtgttgtttcgtaagctctgtctaaatagcctttattgattcccttcgcaaatgcgtacatgtacaggcaggatcctgagctttccagccagttatcagacctgtctcccttatcaacgatctgataccataaccccgtctctttgtcttgatagcggcagatgctttccatcatgtcctgcagcgtgtttttccacccatgacggtttggatgcttcttcggcagctcttcaatcatgtcagcaagagacatgacgtaccagccgatggaacgtgcccaaaattccggtgaacagcctgtctcttcattggcccaaggcatttttttcgcttcatcccaggcgtgataaaagagtccgttttttgcatccttcgtatgctttctcatcaatgactcctgcagcacgacctgatcaaacagctccggctcctgcttcagattggcatatttcagtgcgaacggccccccatgtataagccgtcaagccacatttggtatggataaccgtctttgtgccaaaaaccgccctcagacgtccggttcagtgttccatataaaccgcgcagcctttttgccgctttggcataccgttcatccttcgtctgctcgtataatggaaaaagaatgagacccgcttgaatggcgtccagttcatctcttctaaataatagattgccataatcatcgattaagagatctgcataggccttcgcatactcaaaataccgcttttccccggttgcttcccacagccgcaatacaccgcataagaaaacaccctggtggtagtgccagcggtttgcaggaggcagctcctggactgtgtacgtattcataatggtttttgccaatgcctccgcgtacgtaagaggcgattttacagcgattgattgatccattgatcccatccctttcttaataaattccttcctcgccaaatttcttcgctaaacgattcgcaagcatgaccaaaatcagcccgaccgccgctttaaatacgccgactgctgtactgtagctgaattgtccctgtttcagccctgcagtataaacgtacgtatcaaaaatttccgccacttccctgtttgtcgcatttaacagcaaatacacatgctcgaagccaagctccagcgtgtctccgattttcaaaatcagcaaaacgacgataacgcttttaatggcgggcagcgtaatatgccacatttgccgcagccgtcccgctccgtccattttcgccgcttcatacagctgggggtcaaccgctgtaatggccgccagataaatgatcgtcgaccagcccgcttccctccagataacctgaagaatatacaggggccggaaccattcttcgttcagcagaaaattgattttttcaccgccaaaaaacacaatcagttcattaatcaagcctccgtctaccgttaaaagcacaaacgaaagcgatacaacaatgacccaagacataaaatgcgggatataaatcagcgtctgaacaaattttttaaagagagcaatccgcacttcgttcaatagaagcgccagcagtatcggcaccgggaaaaatatggccaggttcaaagcaaataacacgagcgtgttttttaacaagagaaaaaatgtaggctcagtaaacagcctgataaaatgcttcagccccacccactcactgcccaaaatgccgaggaacggctgataatcctgaaacgcaatcacaattccccacatcgggacatacttaaaaagcaaaaaataaatacaccccggcaaaatcatcaagtacaaatatttttgctgaatcagcttgattagtaagcgctttcttttttcttttttaaaaatgactgtatcaacagccggcgcttgcgcttctgctgttttcattttttcccatcctcctttcacgggttcttgcattcactgtagcgcagaggtaaaagtccgtctacaatcatatgatcacatcctgttttatccctttataatcaaaggttcaggaggtccacctgaaaaaaagacaccgatattagaaaatgattattgacaatatctatcaatctttggattaattgtattaaggtgaagtggatgttatgaaatggggggttttatgaaaagaagccaatacaagttttactacaaactgattacgtttttctgcctgctcagcaccattccggttattttggtcggattgttttcgtacgagcactctcagaaaacggctatatccaacgtttcagaggaaaaattcgacacactccagcagacccagcaaagcatcgagcatatattgaaaaccgtcgatcactctttaacccactatgtgagttcgccgcctctccttcgcacattgtccgagcctttgcactcagaccaatttcaaatctataaccaagtgaaccaagagctcaattatctgcaaagctttgataccgatctgtccaacatgacgttagtcagttatacgaaaaaatggtacatgaacaattccggtttgtaccgtttgaatacagacactcttcatgaagcagcctcagcgtacacgaaacaaaaagcgagccgctcctattggacgcttgaggaaaacaatcatttgatttcaaccaaagaaggcacagcagaaaactgccgctacaatatcaatttaattaagcagcttcctttgaacagcacaaatacaaagggattggccgccgcaagcatcccgagctgttcgcttgtcaaaaatatgcccggctattcaaacgccaacaacctgtttatcatcgatgaaaaaggcctcatcatccttcataacaatatgtctgacgttggtgaatctcttcataacgacggctttgtccaaaaagtgctggcgcaaacggccaatagcggacagtttgaaacagttattgaccggattcattataaagtcacctatcaaaaatctgactataatgcatggacttatttttctctcgtttccctgcctgagttaaaaaaagaagccaaatcaatcggctggatcacttttgcagtatgcctcattttgttaacgctttcattgctgttctcttggcttggctcccgccatttttacaagccgatcagggtgctttacgaatcattcgcaaggcatggtgccatacaagaaaaacagccgcctcaaaatgaatttgagttaattgaacagagctttaagcagctgaaggacagaaatgatgatcttgaagaaacgatgaagcagcaagccacccacctgcagcaatattttatggtcaggcttatgctcggaaaactgacggatgaggaggttaataaccgttttgaaagcctcggtttaaagcaaaattggcggcaccttgccctgcttgtgctccaaattgacacactgaatcatacgccttatgagaaaaaagatatggatctgcttttgtttgccgtcaacagcctgattgagcgcaacatcccgacggacaaacatcttgcccccgccgtagttgacaaacagcaggcgacgattttgatcaatcaaagcgggacaaaggaagaattcatggctgagctgaatgagactgcaaggatgattcaggaaaaagcggaagctgagctgcagctgtctgtcagcatcggcatcagccagccgtttgatgtgctgacaaaagcgaaaacagcctatgcggaaggctcagaagcgttgaaatatcggctgaaagcggaaaacaagtcgatcatcttttacgaagaccttgaccagaaaaaaaccttcaaaacccattttccaaagcagcttcagcatgagctgttcgatgctgtcaaagcaggagacaaggagaaagcggataaatgcctgcacgcgattttacaagccattttcacccagaacaccaacccgtatcaatttcaaatcgccatcgcccgttttttgaaccatgtgattgagctgatgcatgtgcttgggatcgaattgtttgagcttgaagaaaacaaaatgctgtatgaccaaatttttgagctgaaaacgttcgaggataccgaaaactggctaaagaatgagtttattgatccgatgacagacaaagtgaacgcccgcgcggatgcccagtacaaaaatatttccgacaacatcattcatatcatccatcatgagtttgaatccgaattgacactggacgaaatcgcacgcaggctgcattacaacccaaattatttaagcagtattttcaaaaaagaaatgggaatttcattcagcgagtatgtctcaagctaccgacaccatatggcgaaaagctggcttgccgaaaccgacatggcggtcaaggacattgccgaaaagctgaaatataaaaactcgcaaaacttcatcagatcatttaagaagctggaagggattacaccgggaaactaccgccagcaaaaaagaagcatgtaaaaaacccaaaaccgcttgcgcgttttgggtttttccaatgttattttgcttgtttaaacgcttcttcgtattcctgaataatttgttttcctccgcttgactcccatttttccacttctttatcgaactggctttctgtgatgtctccaatcatatatttgtaggtcgcgtcatcaatgattttcttcagttcgtcaccccgttccgactccgatgcggaatacaggctttcagccgggtttgagacgataatcttttcattgtcctcggtcagctcctcgtacgccgtccgaagcggatctccagtgttttttaagtaggctttatcaatggcaattaaagcggacagcggctgaatatcagtctgccagtcttttacctggctttctttgcgtgtaaacgttttgtcctcacctttgttgtaatgaacgccgtcaatgccataagtcatcaggctatagacatcttcttcggcaattcggtcaaaaaacgccaagatccgtttaagctcagcttccgttttcacactcgttttcgggaaagcaaacacgccgttatggcctcctgatgcccatacccgctctttcccatctgggccttttatgcggttgatgatctcgagcttcatcgatttatcagaggcatggtcgcgcagattgaccgcatctaccatattgccaatataaattccggcttttccttgagaaaacagctcctgctgctgggttttgcttgtgacgggaaaatccttattcatatacccgttatcacgcagctttttcatatagttcatcgtgtctttgtattcctgtgtcatgaaatcaggcgtgaatttgccgcccgattccttccaatctgtcggcatgccttcatacgagccaatcgttttaaacgcgccgtaaatcaagtcattacggtctgccagcccgatcgtatcatctttcccatccttgtccgggtcgtcctccgtaaatgctttggccacttcataaagctcatccaacgttttcggggttttcaaatttaaattgtccagccagtccttccgaatgacgatcccctgtctggaaagcgggcgctctctgtatatcccgtagagctttccgtcaattgtcacatttttattaatgagtttgttcattttgtttaagttgggataatccttgatataatcgccgatttcccaaaacattcctgaccgaaaggcattcatgactgacgaatttttaatatcctggatggtcacgatttgcggaagattcccggctgcaagcgctgcattcagcctgtcttctttcaccgcgtctggaacccaggtgatgtcgagttctgtatttgtcagcttttcaatttctttaatcgccctgtccttcggcggctgctgatgatacaaaatcgccatccaagacagctttatctttgaatctgggccagctttgccttcagccgaagactgatcagttcctttacagcccgccagcactccgccgagtgccagtacaagcacaatcaaaagcaccctccatttgtttcccatcgtacccctccgtttcatatttctttatcctttgacagatcccagcaaagctccttttgcaaaatgcttttgtataaacggatagacaagcagaaccgggatggtcgccaccactatgaccgccattttaatggtttgctcaggcggcgggctgcccgaccccatttcagacatatccccctgcataccgcttgatacaatgacgatttggcgcagaagaacctgaattggccattttgctgaatcatttaagtacaagatcgctgtcatatacgtgttccaatacgtgaccgcataaaatagtgaaatcgttgcgatcgcaggaagagacagcggcagcacaattttaaagaatatgcccagatcattgcacccgtcaattttcgcggactcttccaggcttgatgggatattttgaaagaagtttttcagaatgatcaggttaaaggcattaatggctgtcggcaaaataagcgcccagtaagaatcgagcaatccaagcgatttgaccacaaggaaagtcggaatcatgccgccgctaaacagcatcgtaaatacgacgagaaacatgagcggctgccggccgattaaatcatggcgggataacccgtaagccatcagtgaagaaagaaacatgctgaccgcagtgcctatcactgtcacaaacacagaaacaagcaaactcttataaataatatctgttgaaaaaatgtagcgataagcatctagcgaaaaagtggtcggtattaaaataaattttttcgacacgacttcttctactgtggcgaaggatgctgcgatgacatgaatgaacggaagtacgcatattaaagcgaacatcagcaagaaaccataaatcaacatatcaaacagacggtttttcagtgaatgtgcgatagctcccacctctctttgtaagcgttatcatatttcggaaaccgagctcagcatgtgacgatatcgtgtctaaaatgtagcaaatctgtgattgccatgtctataatcatttgaacagtgtccccggccgggcgggggctgccgcgaattgagaccgataacaaaagaaaaagagcataatcttagaaaatgattatgctccgttctcctcctcgttcagaagttcagccgtattgatttgtggcgaaaacccaagttcattcacggcagattcaatggaccatggccggcccggattatcagagacggcgtaataagtgccgtaccggatattggtctcaatagcggctttgaaaatcgacagcagatcggggtgagaaagcagtgtctttttcgtccgttctttttcatgcagcgtatccatttcatctgtgacgactgttccgattcgcaggttgattactgatagcttattttccaaataaaacaaatggccgatctgttcagaggtcagctttaatacaccgtacaagttttttgacagcggataatcgcttgttgtgatttcccgtcctaagagcgagcgcccgtctttttcgtagacatctgtgacatgattactgctggcgaacacgagcttttgaatgccgagctccgctgccgcacggcacagataatagcttgccctatagaaaacatccgtcattttttcaaactcagcgatgtccataatatcgtatttgattttcacagcgagtaaattcaagatgacatccgtatcttttggaatcttcttcaacagctcctcataatttgccgcgtcagcctgaatggaagaggctttgccatcgaaatgatctttatcaagcacagtcacttcatagtctgaaataagcccttcagcaagcagtctcccaatcacaccatttccgccggcgatcagcacttttttcactatgttcactccccttttttatagattgcccattttcggcggggctgacacttttttggcactcacattcttaggcttattcaaaagtcaccggcagctcctcaagcgcccgaaatccaaaaagcggccgataccgccattcaaaatccgcgagattaaggctgggcattcgctgcagaagagtgttaatcgcaatttgcgcttctaatcgtgccagcgaggaccctaagcaaacatgatggccatgcccgaatgaaagatgcggattaggacttctcgtaatatcgaagacatcggggttcgtgaatatgctagggtctcgattagccgcccctaacaaaagatagacttgttctccttgacggatcgtcaccccgctgatgtcaatatcctctgacgcaactctggctgtcatttgcgtggggctttcatagcgtaaacattcctcgactgcggtatcaataagatctggattttctctcagtttcaaaagctgttctggatgctgcagcagacaaaggactgaattgctgatgagattgaccgttgtctcatgtccggcgatcgccagcaatatgcacgtagatgccgcttcctcttccgtcagcttatccttttctttccccttcaagagcatgctgatcatatcctgttgagggtggcgttttctcttttgaatcagctctttgaaatatgccatagcctgcacagccataatattgccctctgttaatgcctttcttgagcgggtaaaatcaatcgtttgaatgagactcgcagcccactcctttaattgctccctatcttcctccggtacacctataatgttagctatgacaaaacttgctaaaggaaaagcaaagtccgaaatgacctccatcttttttttaccttgcacttgatcaagcaaatgatggacagtttcaatgatatacggctgataactctctgtcgttctcggcgtaaacgctccgctggcaagcgtccgcaatcgtctatgatcaggccggttctgaaacagcatcatttgattttgcacatgtgaaaggtcctgatatttggttgagctctcaggcagcggggtgcggactttgaatctcgcatctttcaaaatagcagccgtttcttcatatcctgtgacataccagcccgggtattttaagaaactccctttatagataggatgaacagctcgcaatgtgtcgtaaaaagaatatgggtttttcaaaaactcagaagatgcagttgacgatgcaattgtcacgtgattttctcctttctgttcaaaaataaaagcaatcgacatcataccgattgcttttattgattctttcagcttttcgcacttaaactggccttcatttcttcgactgattcaacttcaaagcctaaatcactcagcattttatgatcctccgtctcctcttgcccggcagttgttaagtagtctccgacaaaaatggagtttgcggcgtaaagccctaatggctgcaatgagcggagattgacctctcttcctccggaaatgcgaatttcttttgatggattgataaaacggaacagcgccagcacttttaaacaatacagcgggtttaattcgttgacgccttctaacggcgtgccatcaattgcatgcaaaaaattcaccggaatggaatccgcgtcaagagccttcaagcttttggcgatgtcaatgacatcctgtttcgtctccttcatcccgataatggcgcctgaacacggagacagccccgattcttttgcgatttcaaccgtattgactctgtcatcgtatgtatgtgaggtcgtgatgtttgaatggtttctctgtgacgtattcaaattatgattatagcggtctactccggcatctttgagacgcttcgcctgctctggcttcaacagtccgagacacgcacaaaccttcagtccatacgtctctttaatttcctgaaccgcatctacgacctgatccacttctctgttagacggccctctgccgcttgccacgatacaatatgtgccgatattcagatcgtgcgcccgcttcgcgccttcaagcagcgtttccttattcaccatccggtaagactcaatcggcgctttcgaaatcgcagactgtgaacaatagccgcagttttccgggcagagcccggatttcgcattcataatcatattgagctttactttttttccataaaagtgttttctgatatgaaaagctccatgcattaatagcaaaatatcttcatcaggacaatgtaatattgaaagcgcctcttcgtcagtcacttctgctccagccagcacccggtctgcgagttccatccattgattcattctcatacccccacttgattcatcagtaatgatagattgatatggtcttttaccatatgtagaaccgtttctttcgtcacgttggcaagctttggcgtaacccctaaaatcggcacaccgcataagcgctcaatcatctcaggattggttttttcatcttcatcaggagagtcactgattccattgatgataattccggcaattggaagccccatgctttctgcatatttgacagttaaaaaggtatgattaatggttccaaggtgaggacgtgccacaataatcatgggaagctgcaacgcttttatgacatgactgaccaaatagtcctctcccaatggcacagaaataccgcctgcaccttctacgatgaagcattcatgtttttctctaatccgcccccaatggcttaaaacctcttccatggtgacagtctttccctcaagtttccctgcaacgtatggtgcaagcggcgctttgaaggcaaaaggcgtaatgtcttcatgagaaagactggtctgcgacatgtctttcagcaaacttgtatcactatctggatgatgacgcgatatcccgcttaaaaatggtttatacacaccgacatctctattatgttctttcaataaggcagcaagaccgctggatataaccgttttccccacttctgtatcagttcccgtcacaaaaaaacccctcaaatgatatgcagctcctttccgattgaatgaaatgttttcagcaaatcatcaatatcacccatactgtggtcagacgtgattgtaattcgaatacggctttcacccggtgcaacggtcggcggccgaatggcaggagcataaattcccttgccctgcagtttttcagcaaataggaccgttttatgggcatcgccaatgactacaggaataatcggtgtgtgatctcctttcaccacataacccatattcttcagactggttctgatcgtactgatataagaaaataaaagctgtcgtttttccctgctggcttcaatgatgttgaaagcctcatgagcagccgcacagctggctggcggaatagcggtttgaaagataaatgttctggcatggttcagcaaaaagtcgatgaagaccgctgatcctgccgcaaaacctccttccgcgccaacagctttgcttaaggtgccgatcacaatgtcgggacaaacaccaaagtattcactcgttcctcctcccgaatcgcccaaaactcctgttgcgtgggcatcatcaacgaccacgaaggcatgatagcgtttcgcaagtgagatgatctgatcaagaggggcgattgtgccatccatgctgaataccccgtctgttacgataaaacggcgctgataacgctgtgtttcattcagcttgttttcaagatcattcatatcaatatgccgataaacaactgtatcagccttagaaagtcggcagccgtcgataatacttgcatgattgagctcgtcacttaaaatgacatcttccttttctggcaaggatgaaaggagaccgacattggccaagtaaccgctcgaaaacagcagggccgcttctgtccgtttaaagctggcaatcttcttttctaacttttcatgccagaccgaattgcctgtcgttaaacgtgaaccgctgcttcctgtcccaaattgctgcaatgctgtttgggctgcatcgatcaaacgtctatcgcttgcgagccctaaataattgtttgaggaccagaccgtttgattttcgccatcaatgttccgctctggaaccggcgctccatccattgaccgcaggttacggtgtacgccggcttcctttactatgtctaaccgctcgtttaaccaggaatcaatcttcaaggctcgtaacctcgtggatcgcttgtttcataatggcaaccatttccgagagctcttcagctgtgctggcaagaggaggaagaaatgcaatcacgtccccaagcggccttgtcagcattcctaactctctcatttttaaggaaactttgtatccaatccgccgatcagccgggtaaggttctttggtttcctttgatcgtacaagctctgcaccgcacataaagccaagctgccgaatatccccaacataaggaagagcgtgcagatcttgaagaagaaaatggagctttttactttttttcgctacttgttccacaatgttttcagattcaaataatgccagattttcaagcgcaactgcacagccaagctgattgcctgtataggaatggccatggaaaaaggtttttaggttttcataatcatcatagaatgccttatagatgtcttcagtggcaaacgtaacggcaattggcaaatagcctcctgtaatgcctttaccggcagccatcagatcaggctggacattctcgtgctcgcacgcaaacatttttcctgtacggccaaagcctgtagcgacttcatcaacgatcattaagacatcgtatgttgtacatagctcgcgcacgcctgccaaatatccttccggcatcacgatcataccggaagccccttgtaccattgattcaatggaaagcgcggcaatttcctcgtgatgttccttaagcagctgttcaagctctcggaggcactgatcacggcactcatcaggatcaccgctttcagagcgatacacataaggaatcggggccttgtaactctcgaacatcaacgggccgtatacgtggtgaaaaagctcaattgaaccgacactgacggcgccaatcgtatcaccgtgatacccgtttttcattgcgataaatttttgtttctcgggcttcccgatgttcttccaatactgaaacgccatttttagggctatttccatcgcttctgcaccgctgtctgaataaaagacccgcgtgagcttttttgggctgatatcgattaatgtttcggcaagctgggttgctggaacgttggtcatgcccaataacgtggagtgcgcaatttttccgagctgtttttttatggcattatctagttcttttttgcggtgtccgtggacattaagccaaactgatgaaaaaccgtcatagtattccttgccatttatgtctttgactttgattccagtcccgctttcgatgattaaggggttttcatcataatctttcatttgggtaaatggcagccagaggtgctttttacttttttctatcaaatcatgagtcatgatcttcctcccactctattaaaataggctgcttctccagatcatgtatgtacgtgtttacatcattggatccatcaataaaaaagactcggcagccctcttcagtcccgtattctttcattgctgtaatacgctgatagcccattttcttacccgcaacatagcctgttatgtaatccggatcgtccgaccagcataattctgcaacggctgccgggtgccggcttacctttgaagcgagcgcaagggcctcttttattcttgaatgagccggcacgtgactgtgaagcgcccatttttcaaaattagcgtccggccaatccattctggagacccgcacccctttttcttttgtttgatccattcgctttcctgtatgaatatcaaacaacaccgcacccctgatatctgaccattcagggatttgttcatatgctttttcaatcacgtctcgtgaaacgccttctttttccaataacaatcgggccagcttttgcccttcttccgggcagctcacttcattcgtatgcacaggcaatggctgaatggtttttatcgattcatatacctcttcaaattgaatttgcataaaatcaggttttcctcttgaatgggataaccctttttctaataaagcattgactgtatgcttcatctcatggaaaggtataagccgttctccgccggatatatgctttccgccgtcttcatgagatccattcatagaagccctcattctgacactataaaaagtttcttcttgcatcatttctcgccctttcactgataactgaagaacgtgtagtgcttctcaccttaattgttaaccaattatattttaaggttaacaattagaatatattattctctcctgtttctgtcaatagaagaaagcatcgatttatggcagttggttaaaaggaaacaaaaagaccgttttcacataaaacggtctttttcgatttcttttaacagtcacagccacttttgcaaaaaccggacagcttcatgcctcataactgctgtttcgaaatgtcccgaagcagaacggaccactcggtagcaatcagaagctccctgtccagcatagacagctgtcaattctttttcgattttgtccacgccctcggccggcgttaaccgatcgtgtacaccaacaagactaaggtgcgggcgcggcgcgatcaggccttggatctccgatgcggaaaaatgctttgcaagcgatgggacgtaataataaaagccgtgcctgtcaagattctgtgttttgatcagcacgtgatgatccacctggctgcacaaatccacacacaccttaatccggtcatcgagcgccgctgtccaccacgccatcaaacctcccatagacatgccgatggttccgatcctgtcaggctgaacatcagagcgtaactgcatatagtccaacgcacttaaactgtcataaatcatcatcccccacatcacttttccggtgagaagcatttctttaaatatctcgctttccgcttttccccgccgatctccaaatccccaatgatcaatcgcaagaacgccgtatccgagtgaagtaagctcatcagaaaaagaaggcgttttcaaataatccgctccctcaatcagctcactttttcccctatcatactggcccccatgcgaatgctgaaacaatacggctgggcacggtccttctgttttcttcggcttcacaaaataagcgggcaccttttcatgtccatttaaatcgagcaggagcgtttcaacgatattttcttctctttcttcaatacgtaatgtctcaacactgattggcctccgatcaggcaaatcaccaagcaatcgaaacagttgctttcttctttcggctctcatcccatcacccttccttattcgcttacttcacatttacgagacagatctgggttcccctttatttttccaacataaatcacatcatttactaaatatttagtaaatattatgaaatatttcgaaaacaattattgtaaccgcttacttttatatgatagtatcaatttatcaaaaacagatgagttaatattttactaaatagatgagagggatacccatggttcgtattaaagatatcgccttgaaagctaaagtttccagcgcaactgtgtccagaattttaaatgaagatgagtcgctttctgttgcgggcgaaacgagacaaagagtcatcaacatcgctgaagagcttggttatcaaaccgttgccaaacgccgaaaagcccgcgggcaaaaacagcgggctcagccgctgatcggtgtgctgagctgtctgtcccctgatcaggaaaggcaggacccttatttttcttccattcggaaagggattgaaaaggaatgctttgaacaggaaattttcattacaaattcgattcatctcggctcctttcaggaacatatctttcgggaattggatggtgtcattgtcatcggccgtgttcatgatgaagcggttaagcatatcagcgggaggctggagcatgccgtatttatcaatcattcaccagatccgcaagcatacgattcgattggaatcgattttgaatcggcttcacgccaggcgattgatcaccttttcgacttaggctacaaacggttaggctacattggcggacaagaaaaagagcatacgctgaaggacggccaaagcattcgcagaacgattgaagataaacgcctgaccgcttttttggagtcagccgccccccagcctgagcatgtgctgatcggagaatacagcatgcgtgagggctatcgcctgatgaagaaagcaatcgatcaaggccatctgccggaagcattctttattgccagtgattctatggcgatcggcgcattaaaagcgctgcaggaagccggactgcaagtgccgcgggatactgcaatcgtcagctttaacggcattgaggaagctgaatttgccagcacgcctttaacaacggtgaaggtatacacagaggaaatgggccggacaggcgtaaaactgctgcttgaccgtctcaatggccgaacacttcctcaccatgtcaccctgcccacaacattaattgtaagacaaagctgcggatgtacagcaaaggaggtgacataagcaaagattcatcacgatgataaggaggaaaagatgaaacacacttttgttttatttctctcttttattctgcttgttctgcccgggtgttcagcagagaaaagctcagcagataccgcaaaaaagacgttaaccatttattctacaatgtcaaccgacagtgaaagagatacgttcagaaaactagcggcagcattcgaaaaggaaaacagtgacattcatgtcagccttcatttcccaggcaatgactatgaaaatatgatgcgtgtcagaatggcggccaatgatttgccagatctattcgatacacatggctgggggaaaatcaggtacggagaatatacagcggatctccgggatatgaaatggactcaagatcttgatccaaatttaaacagcatcctcaaaaataaaagcggaaaggtgtatgcctatccaatcaatcaggcaaaagacggtctggcgtataatcgcaatattttagaccgttacggcattgctccgccggaaaccatggatgactttatcaaagcactgagaacgattaaagaaaagagcaagggaagcattgttcccttctggtttgccggatatgacaaaagctcattcgcccaatattacgaccaattcgctacacctcttctcatcacagaccctgcccataatgaaaaaaaacagctcaccaatggcactttcaaatggaataaatttacttacttatcgaaaatcctcaaacaaatgcagaaagaaaaattgattaacatcgacgccgtcacggcaaaaaaatcacagctcattgaattaatggcccaaaacaaaatcgcctttacaatgcaaggcggcacactcggccaagacgttgcccagatcaatccgaacgtcaaggtcggcattatcccgacacctgccatccatcccggtgatgacccgatatggatcggcggtgaacgctacacccttgcagcatggaaagattcgcctcaattaaaagaggcaaaagattttatcgcatttatggcccgcccggccaatgccaaacaaatggctgaagccacatcgcttccttcagggctgaccaatgtgaaagctgatattttctacgcaaacgattatgagcattatcaagatgtcaaagtcgagccttacttcgaccgtttatacttgccaaacggaatgtgggatgtcctaggcacggttgggcaggagctcgcggctgacattttggcgcctcaagacatttcgcagaagctgggaagagaatataaacgactccgggagcaatcggaaatacagggagctgaaaacaatgagtgagatcgcaagggacgttcatgtgaaacaggttaagccaaaaaagcagtcctcactttggtggatgtacattcctgctttgctctccgttctggtctttatgatttatccgtttgtgaaaggcacattgattacctttacaaactggaacggcttttcacaagtttaccaatgggttggattcgcgcaatatgaaaggctgttttctgatcctgacacttggcatatcttaaaaaacacgctgctttacgggcttggcagcactttttttcaaaatgtggtcgggcttctatacgctctgctcttaaatcaaagcattaaaacgaaagcggtaacaagaacaattgtgtatttgccggtgatgatcagcccgctcattatgggctacatatggtactttttcttctcctatgacggaggcgcgctcaacgatttgctcggggtcttcggcatcagccctattaatgcgctcgccagtccctcgctcaatccatggatcattgtcatgattaacacctatcaatatgtcgggattgctatggttgtctacttagccggtctgcaaagcattccgaaagactactatgaagcggcgcgaatggatggcgcgaaacaaggccagcagttttttaccatcacgctgccgctgttaatgccctccattaccattaatatggtcatcaatattatcggaggcttaaagctgtttgacgtcatcattgcactcaccgcgggcggtcccggaaatgcgtcacaatccatgtccacgtttatgtatgatttgtatttcaaacggcaggatgccggctatgccgcaacgcaaggcatatttatggcatttgtcattttgatcatcagcttttgcgcgcttgcgtactttaaaagaaaggagacggaaatgtcatgagagccgtccgtacaaaaaacatgcggatcattacgcttcttgccgccattgtggcctgtgcgcattttattcctttttatatcctgctgaccacttcattgaaagcaaaaggagactacagttcgaaatggatatttccagccaacatctcctttcacaatttctcagaggcgtgggagcgcgcttcgctaggtaactcttttataaacaccatgatcatcacaggtttttctgccttgttattaattatattcggctcacttgccgcctacccgcttgcccggagggaaacgaaactgaataaagccgtttttgccttgctgatttccattatgatcatccctccgttaacgtccatggttcctttgtaccgaatggtcgtggacgccggaatggtcaatacacacgcaatcgccattttcatcaatacagcagcttacatgcctttaaccgtattcttatattcaggctttatccgatcgaccattccaaaagagcttgaagaagccgcaagaattgacggcgcaggcatgctgaaaatcttttttacgattgtgtttcctctgctgaagccgatcactgcgaccatctgtattatttcttgtgtctttatttggaacgactatcaatttgccattttctttttacaagatcaaaaggttcagacattaacagtcgccatggcaagtttttttggagaaaacgcaaacaacctgcatttagttgccgcagcggcacttatggcaatgctgccgatggttgttctgtttttggcgctgcaaaaatactttattgccggcctgtcttccggagcggtaaagggttaacattaaagggggaagcaatatgaaaaagattacatttatcggtgcagggagcacgattttcgccaaaaatgttttgggagactgcctgttaacagaggcactgaatggatttgagttcgctctttacgacattgatcccaaacgcctgcaggaatcccagctcatgctcgaaaatctaagagaccgttataacccaagtgtggccatcaacagctatgatgacagaaaactcgccttgcaaaacgcaggctatgtcatcaatgcgattcaggttggaggatacaaaccgagcacagtcatcgatttcgagattcctaaacggtatgggttgcgccagacgatcgccgatacagtcggcatcggcgggatattcagatctctcagaacaatcccggtcttatttgatatcgcaaaagatatggaggaaatgtgccctgacgcatggttcttaaactatacaaatccaatggccactcttacaggcgccatgctccgctataccaatatcaaaacaatcgggctctgccacagtgttcaagtgtgcacgaaggatttatttaaagctctcggaatggagcatgacggaattgaggaacgcatcgcaggcattaatcatatggcttggcttttggaagtcaaaaaagacggcacagatttatatccagaaatcaaaaggagagcgaaagaaaaacaaaaaacaaagcatcatgatatggtgcggtttgaattaatggataagttcggctattatgtcacggaatcgtccgaacataacgcagagtatcacccatactttattaaacggaattaccctgaactgatcagcgagctgcaaatcccgctcgacgaatatccgagaaggtgcgtcaagcagattgaaaattgggagaaaatgcgggatgatatcgtcaataataaaaaccttacgcacgaacgctcaaaggaatatggttcaagaattatagaagcaatggaaacaaacgaaccattcaccttcggaggaaacgtcttgaatacagggctgatcaccaaccttccttcaaaagcggttgtggaagtgacatgcgtcgccgacagaaaaaaaattacaccgtgcttcgccggagaactgcctgagcagcttgccgccttaaaccggacgaatattaatacacagctgatgacaatcgaagcggctgtcacacggaaaaaagaagcggtttaccaagctgcaatgcttgatccgcatacaagcgcggagctttccatgaaggacatcatctccatgtgtgacgatttatttgcagcacacggcgattggcttccggcatacaaataaaaactaggggaccgctctcccctagttttttggttttgtttcgccttcccaggccatcatgccgccttcaacattgactgttttaaagccttgctcatccaggtacttgcagacgttcatgctgcgcattcctgagcggcagataaatacgtactctttgtctttatcaagggtttccattttttcaggaatatcccctatgcgaatatgaacggcttgcgggatcatgccttccgctacctcttcatcttctctgacatcaattaaatataattcttcgtccgcctcaattttttctttcaaagcggctgtgctgatttcttttatttccaaagaaaacactcctattcacagtgatcatgttcagtatatcaaagtcagctgaacgattgctattctgagactgatgaaaaaaatccccttttggcaaaggggattttttctaggcttagtttgccacaatattgacaagcttgccaggcaccgcgatgattttccgaatcgttttgccttcaagctgctctttgaccttttcatctgcttgagcaagctgttccagctgttctttcgttgcatcggcaggaacctgtaatttcgcttttacttttccgttcagctgaataacgatttcaacttcatcatccacaagttttgtttcatcatatacaggccaagcttcgtaggcaattgtgccggaatggccaagcttctcccaaagctcttccgctaagtgtggcgcgacaggagaaagaagcttcacgaagccttccatatattctttcggcagttctgttgctttataagcttcattaataaagaccatcagctgggaaatacccgtgttgaaacgaaggccttcataatggtctgtgactttcataaccgtttcatgatagacgcgctccaatgtttcacccgcgccttcaacgattttgtcattaagctcaccgctgtcttcaataaataggcgccatacacggtcaaggaaacggcgcgcaccgtctaatcctgattcagaccaggcgattgaagcatcaagaggtcccatgaacatttcgtacaatctcagcgtatcagcaccgtgagaggccacgatttcgtcaggattgacaacgttccctttagatttactcattttttcgttgttttcgccgagaatcattccttggttgtacagcttttggaacggttctttcgtcggcactacgccgatatcataaaggaacttatgccagaagcgggcatacagaaggtgaagcacggcatgttctgcaccgccgatatacatatcgaccggaagccatttttccaatttttctggtgatgccagctgatccggattgtgcggatcaatatagcgcaagaaataccagcagcttcccgcccattgcggcattgtattcgtttctcttcttccttttttccctgtctcagggtctgtgacttccacccactctttaatgttcgcaagcggtgattcgcccgttccgctcggtttgatttcatccgttttcggcaaaatcagcggcagctcctcttcagggacagctgttgacgttccgtcttcccaatgaatgaccggaatcggctcgccccaataacgctggcggctgaagagccagtcacgaagacggtatgtcactttcttctcaccgtttttcgtttcttccagccaagcgatcactttttcaatcgcttcctgtttgtgaaggccgttcaggaaatcagagttcacgtgctcgccgtcgccagtataggctgcttcctcaacgttccccccttttacgacttccttcaccggaaggccgaatgttttggcgaattcaaaatcacgctcatcgtgtccaggaactgccatgacagcacctgttccgtatgatgcaagaacataatccgcaatccaaatcggcagtttttctccgtttacaggattgatcgcatacgctcctgtaaatacgcctgtctttgttttcgcaagatctgtgcgttctaggtcactctttgattgaatttctttgatataagcttcaacagcttctttttgctctgccgttgtgatgttttccaccaatgcgtgttccggggcaaggacagtgtatgtagcgccaaacagcgtatctggtcttgttgtaaacaccgtaaaggaatcatcatgtccatctatagcaaaatgaacgtgagcgccttccgaacggccgatccagttgcgctgcatatctttaatgctttccggccaatcaagctcttccaagtcctcaaggagcctgtccgcataagcggtgattttcagcatccactgcttcattgggcgtctctctaccggatggccgccgcgttcgctcttgccgtcaatgacttcttcgttggcaagaacagtaccgagcgcagggcaccagtttacaggcacttcgtcaacgtaagcaaggcctttttcgtatagctttaagaaaatccattgcgtccatttatagtattcagggtcagtcgtattgatttcgcgatcccagtcatatgagaagccaagcgcttgaatttggcggcggaagttatcaatattctgcttcgtaaacacagcggggtcgttccctgtgtcaagcgcgtattgttcagctggcaggccgaatgcgtcccagcccattggatgaaggacatcatagccctgcatgcgcttcatgcgggacagaatatccgtagctgtgtatccttcaggatggccgacgtgcaacccagctccagacgggtaaggaaacatgtccagcgcgtagaatttttgtttttcattattatcaagagtggcaaatgttttgttttcaagccaatatgtttgccatttcttttctatctctttgtgctgaaaactcaaagtaaaaacctccttctgattgaatacggcgtgtatggttcaagtattgacgggaaggagaggattattcagaatattcccaaactaaaaaaaactccctcatccctaaaagggacgagagactttcgttttcccgcggtaccaccctcgttagcgcggcatacgccgcactcacttgatacttttaacgcagttatgcgtcagcggcttttcaccgctgcaactctgaggtgagttcggaaacaaacttgattgactttcaccagccgtcaactctctgcaacaatatctgtttcttactgctcctcttcattgttcttatcgcaaccgtaatctaactgtattttatagaattctgttcataagtgcaagcaggtttgtatacaatgggaatgtaccctgaacgggcggagattgaggacaattattcgggtggagttttggtttgacgtttggactcggccggttcgccgccgctgttcagttctctcacaaagtcaaaacttctgagaacagcttcaccgccgtagcctgagataatggataagatgacaagttgaattcctgaatcggggtcagcggataatacaagtaaaatggaagccgtcatgccgataaaccaatcttccaaaaatccaaggtagataaaccgcttcgtcattctgggcttctccagcctgcctctctttttcacatgaccgagaatccccatgattcctccaattacacaagcaatgagtacctgatgcagcatcttcatcatcaccttcctaaagcccttatttcgtaaagcgacttcaggccatccagcccccttaaacgattccgatgattttcgatatctacataccggcaaatctgtaaaaagcttgtttcttccattatatgtgaacacatgatcggtaagcttgatgcattggattcatttttcacccagtgacattgacctagtcacctatttagcatgtaaaaaacctttccgttcatatgttcaaattctgttcttatttttagtgtatacgaggacaagccctaatgacaaacaacaaactgcacttgcttgaatcagaacatgtgttgtgctacggttactgtagaattcattttaaaaaggggaatatcaggctttcgcatagcaagctgacggcctaagggggatttatatggctagttttcaatcatttgggataccaggacagctggaagtcatcaaaaaagcgcttgatcacgtgcgagtcggtgtggtaattacagatcccgcacttgaagataatcctattatctacgtaaatcaaggctttgttcaaatgaccggctacgagaccgaggaaattttaggaaagaactgccgcttcttacaggggaaacacacagatcctgcagaagtggacaacatcagaaccgctttacaaaataaagaaccggtcaccgttcagattcaaaactacaaaaaagacggaacgatgttctggaatgaattaaatattgatccaatggaaatagaggataaaacgtattttgtcggaattcagaaagacatcaccaagcaaaaagagtatgaaaagcttctcgaggattccctcacggaaattactgcactttcaactcctattgtcccgattcgcaatggcatttcggctcttccgctagtcggaaacctgacagaggagcgatttaattccatcgtttgcacattgacgaatatcttatcaacatccaaagatgattatttgatcattgatttatccggattggcccaagtgaacgaacaaacggccgaccaaattttcaagctgagccatttgctgaaattgaccggaactgagttaatcattaccggcattaagcctgaattggccatgaaaatgaataaactggatgccaatttttcgtcgctgaaaacatattcaaatgtaaaggatgccgttaaagtgcttccgattatgtaaaaagatcccgctcacccagcgggatctttcagattgttgacaaaatcctaaaatggttttcattttaggattttgtcatcttttcagcgtgattgaaaacccttgaagtctaggaaggacgagcataggagcggagcgaatgttctaattcgtgagcaccgaagcgcaggcctgacaacgaatgcgagggtttgtcgacacgctgaaagatcccgctcatccggcgggatcttttattatgaagagattgatgcctgcttatttgtttctttagctgattttatccgtttgtcatatagaagcgttgtggcaatactgatcagcagcaataccaacagagataaaacaagagccctaatgccgtaatgatcgacaagcactcctccgaacaggggaccaatcattctgccgcctgtcgccgcactgttgacaaagccttgataaaagccttctttccctttaggggcaagctgattggcaatagtcggcacagcaggccaaacaagcatttctccaatagtcaggatcaccatcgcagcgagaaacatcggaaattgctttgcagtcagcagcatgctgaaagacacaataaaaatgataaagccgatgaccatttgcgcttttagcgactcggcccattttttcaccacaaaactgacgagcggctggccgagcacaatgagaattccgttaaccgtccacagcacgctgtataaggaaagagatattccaatgctttgtgtgtacgaagcaattgtggttgaccactgagaataagccagccatccgagtacatagcctccgcttaaaatgatcagtgcggcaaattttgctttgctgttcacagcatcgtaatcaagcacagacgtttgggacgcatctcccgtctgaatatttcgaaatccgaaatatacaataaagaaaaagaccagatacagcgcggcattcgccaaaaatacatatgaaaacgagaaagacgccacgacaccgccaagcgctgaaccgacagccacacctgcgttttgcgcgacatatatcgcattaaatgccttccttcccccttcaggccataccgatcctgccattgcgtagctggccggaaaaacaacaccggagccaaagcccacaatcgtcagcagcacaatataggctggccaatcatgaaaaaagacaaggcccatcaggcttgctaacgtaatggctatcccaagcataatcgatttaaaaccgccgattttatcaaacaaaaaacctccgcataaattgccagccacactggcgccggaattcagcatcaggacaagtccggctactgttaacgactttcctaaatgattatggatataaatcgtattcagcggccataaaaaagaagcacccgtcacattgataaacattccaatgactaaaattttaagagcacgcggcatactcatccccctttcttacctaaaaaagctcatgaaaaaaacgaaacctaaaacggctccgtacgaatccagttatcatagcacattcattctatctgtctctctcacatttttcaactgatgagcgtgaaaaaatctaacaaatattgtttgaaaaatgtaaaataaatagaaaaagggggcatattatggaaatggcattagcattcttaggttttctggcatgtctcattgcactgggctatggattatatcactttgtcagatatgtactgaaaaaggaaaaacgtttctccaagagacttttttggccgcttttcattggaggccttgtgctgctctttaccggagcagcattggcagaacctgacacttccgcagcaaatgccgagaaaaaatattcagcgctaaacgccgaatacaaaaacctcacaaaagagcatgaagaacttgagaaagaatataaatctgtcagctctgaagcaaaaaaattaaaagacaacaaagaagatcaagacaagcttgagaagcttaaaaacgaaaatagcgatctaaaaaagactcagaaatcattaaaagctgagattaaagagcttcaagaaaatcaaaagcagctcaaagaagatgcaaaaacgacaaaggctgaaaatgaaacactccgacaagataaaacaaagcttgaaaatcaattaaaagagacggaaagccaaaccgccagttctcatgaagacactggaagttcttcaaacaatacgagtaaaagtgatgaaaccaaaacagctgacaaagcagaaggctgtaatatcaaaggaagcaaaaacggcatctaccacacgccaggcagtacatactatgaccggacaaccgatccggctgaaatgttttgctcagttgaagaagctgaagccgccggttatcgggcgccaaaacgataaacaaaaagctccagtatgtctggagctttttctgtttcacaacgacgatttaatgaccttcttataataaagaactgacagaaaaccaaaaatggagtagagcgcagtatataacaccatcaccataatcatgggcgcccatatctctgatccgaataagaaccagccggattggacggcaaagtaactgtggaagagcccgacaacgagcggaatgccgaagttatacatttgtttgatgcgtattccctttattaggtcgccctgcgtaaagccgagttttcttaaaatcgtatagctcggtttttcatcttcactttcacccatttgtttaaaataaaggatacaacctgatgtaatcaggaacgttaaccctaaaaagccgacgatgaacatcaccataccaaacagtgatttttgcgcagcgcttgtatccaatcttgataaatgctcgtttttcttgttcacctgttgaaaaagctcatttgctttttccatttgatcttcatgtttcacattgacgccgataaatgtagattgcgccagctgaattcgggggtctttatccttgttcagctgtttaaacaggctgtcatccacaatgacagcgggcatgcccccgcttgtaaacgtgtaggatacaagaaactcttctcttaatcctttatattttaatggctgcgtctcatgtttgctttttactttaataacaccagagtccttgaaaaccattattttttgcagcaagtcggtgtatcctgagaaaacggcttctccagccgccacatcgactccttttacatctttgtcgctaacaacagcaagctgcatattgctgggatcgccctgcatctctttcggagttccatccataatatttgcaatgtcaacatttgcttgcaggacaggtgttgccttttttacaaacgagatgttgctttccctcaatttgttttcaaataacttggcatctttctcattcatgaatgaaaaatcagccgctacattttgttcagcggtcttttccgacgagtaatacgagatgtaagcaagagataacagcccgatggcgagcgctgaaacggttgtaataatcgtcagcagcagcgcattcgatttcattctgaacatgatcgatgacagtgacagaacctcagaaatatttaagtagccgcccttgctttttcgaatgatattcgagataaacgtaactgatcctttataaaacaaaaacgtcccgataatgacgctccccagaatgaagctcatcgcaacaaacagttcattaatggtcttaaattttccgccaaacagctcagaagacacatagtatcctgtcaaaatcaacacgatgcctaaagcgccgatcagcatttggaaaaatgatattttcttcactttgtcttcagtggaggacgttactttaaacaaagataaaatactctgttttttgataaacgtataattcatgatcatgatcaaaaggtaaatgccgcagaacacaatgaccgtttggaccaaggcctgctcagaaaaatgcagtttcgcatccgctttgacatcgacaattttgaacagaatcatcaagacaagcttcgatatcgaaaacccggccgctaccccgatcgctaatgaaccgaaatacagcatgacattttctgcacttaagatgcgaaaaattttatgcttcgtcattccaattaattgaaacagcccgatttctttactccgtctcttaataaaaatcgtattggcatataaaatgaagatcgccactacagccacaagcaaaatcgaagcggttttaatagccgcggctcccttgattgaagccttcacttcgttaattgctggatcatactgcagcgtgacaaaggcgaaataaagcgccacgctaaagatgagcgcaaacacatacaaatagtaattccggagattctttttcaaatttcgcaggatgagctgattaatgttcatgctgcaccccgcctaacacgccttgcgttttcataatatcctggaaaaacgtttgcctgtcctggccccctttattcagctgtgtatacatttgcccgtccttaataaaaatgactctgccgcagtagctggcagcgacgggatcatgggtaaccataataatcgtcgcgttgcgtttttgattgagctggctcagcttatttaatagatcggaggccgatttcgaatcgagcgcgccggtcggttcatcagcgaaaataatgctcgggtcatgaataaacgctcttccagcggatgttctctgcttctggccgccggaaatttcattcgggtatttatcccgcaattcatatattcccagttcctttgcaacttcctcaaacttgcgattggcttccttttttgatagtttcgtgatcgataaaggcagaaggatattctctttcactgtcaatgtgtctaacaaattgtaatcctgaaagataaagcccaaatgctgttttctaaattcagccagctgcttttccttcatagccgtcatgtcatttccattaatatgaatggttccgtgactgacctgatcgattgaggacagaacgttgagcaaagtggtttttcccgacccggaagcacccataatactgacgaattcgcccttttcaatgtgaatatcgatgcccttcagcacttcctgtttattcagcttgtttccataactttttcgaattttattcgcttctaaaatcaccatttacgcagtctcctttatattggataatctcattataaaaaggaatgccgggcttttccttcgatacggcgaacaaaaaagaaaagcatgtgacattttcgtcacacgcttatgacatgttcaaattgattccgtattggaaaggttaatgtaaaaactgttcccgcaccaaactccgactcaacatcaatatggatcaataacggcgccgctgctttttttgccaagtacagccccatgccagttgacgcttgatcatggtgatccgttgtggatgtaaaccctttatcaaaaatacgcggtacatcttttggatcaatgcccctgccacagtccttcacttggagctgcgtctgttcccctttttgaaaacttttgatctcgatttcagaggcttcgctgtatttcaccgcgtttgtcagcagctgcctgatgataaacgccagccattttgcatcgctcagcacttctttggcctcgagctgtatgtcaaaaccgatccctttttggatacaccacgattgcaaatctttgatttctttaaagatcaaaggctgaagctgaatgaattctacagacagatcgttttcaataaatgatatccgtttttgatgaagctgctgatcaagaagcagatgaatacgcagccattcatatgacagctgggatttcagtgctttttcttccattctatcaatgattaaatgcatcgctgttaatggagttttgacctcatggatccatgccatcagctcatctttttcattttccaatgctaagcgatgccgtgctgcggtctgcttcaagtgttctgtttgcccggcaatgcttctttcaaccattgcttcaaacggcgtttccggttcatttatggctgtcacatcgagattgttctcccatgttttcaagcttttataaaacgctgtttctttccgatagcggaaccaaaggaatatgataaaaaacaaaatgcacaaatacaccatataaagtacattcccaaatgatatggaaggatcgacaaaaacaatgaacagcatcaaagcctgctgaaacaaaaaagcggcaatccagctccgcctttcgataaggaatgctttaatcatagaacttgtcctcttccttcgcgatgtagccctggcccacctttgtctcgatatatgcaccaagctgcagggcgtccagtttttttcgcaggcgattgacattgacggtcagcgtattatcactaacaaaacgctcatcgttccacaagcttctgatcagctcttcccggctgacgatcttgtttttttgctctattaattgttttagaatgaacatttcatttttggtcagttcaacagatcctttgtcattgctgacgaggttctgctccgcgtctacagcagcgccgcaccacgttttaatcgtattcggctccgtattataatggtgcacacgccggaacatcgcttggattttcgcaatcagcacatcaaaatgaaatggcttttggataaagtcatctgccccgagctgcatggacatcaccatatcagcaggatgatcccgggaggataaaaagagaatcggaacatttgaccgggagcggatcagccggcaccaatgaaagccgtcaaatttaggcagctgtacatcaataatgacacaatcaggattaaccgccgcaaattcctgcagcacctgactgaaatcctgaatgccgtatacatcataggaccatcccgttaaacgatccttgatttcatgaaacagcgattcatcatcttcaatcagcaaaagtttaaacaatcaactcaccgcactttttccttttttatcaagtgtatagcaaaacgctatcatgcgctatagaaaaagccggctgtctcagccggctcgttcgcattatagttctcttctcaacgctgtcagcacgttggtttttgttgcttttctcgccgggttcattccggaaatgactgcgacccctccgcaaatcacaacggcaatgatcacaagactcgccgggatgtaggagaatgtgtaattcaagtcgcccgcatcgcttccgcttgtggccgcaagaatcatcggaacggccaggttgacaaggtagctcacgccgtaagaaatgataatcccaatcacacagcctaaaattccgatatacgcgctttccatcaagaacattcggcgaatgattgacgggctcgccccaatcgctttcataatgccgatctcttgcgttctctctgtcaccgccatcgtcatcgtgttaaaaatgccgatcgctgaaatgataactgcgatacatccgacaaagatcagtccgattttgaagaccatgaagaaggtattggctccctcaagttcagtagtcactgatgtgacatagtacccgtcatctgttagatcatttgtcagctgttccacattctcaaacttatcagcaaaaacaccaatgttcgtttcaacatttccgcctttgaaatctaagaattccgaaaaatcttttttgaattgatcactgataaaaatgtttgagtcctccatccagtcttgagatggtttttttgtaataccgacaattttaaagtcatatgtttttgtttttgtaacatcccctgttttaggatctgtcttcgatacacttagttctattgttttgttcagaatatctttcgtatagccctttggttcttttatatcttctggatttccttttgcttcttcgatttttttgttatattcttccgattcttttttcgtcaataatctctttgcgaagtcgtatcctactacgatttcattttccgactttgcgactcttcccttttccaattccatattggcctttaattcatcattcatattagtaaaaatgagatttgagctttcatttgtacgattgcctaaagtagctttgtttggttcatacacttgcgttctttctacaactgaccttacgtgatcatacttctctaaatcagcttttttaataggcttgtctccttccttgcccattacactgactttcgttacaatctgctggctcattgtcatatctgtaattgtcttttgaatcccaaatccaacggacgacaacacaaccaaaaacgcacacgccattgttgtcgccagaatcgtcataaagacgcgaagcctgtttttcttcatatttcttctgataaaatgaacctgatccttaaacctcaacggtaattcctccttttagcacaccatcatgaagctgaaattttgaatgtccgatagaagcgacttcatcatcgtgagtaatgatcacaaatgtaatgccacgctcacgattcagctgctggatcaattccagcacttcatgttccgtttctgaatcaaggcttcccgtcggctcatccgctaagataatcgaaggatttaaaatcaatgctcgagcaatactgacacgctgctgctggccgcctgacagttcattcggataatgagcggcgtggttttccagaccgacgcgtttcagcatgtcctgcaccttttgcttccgctcagatggcttgattccttttaacgccagcggcatttccacattctcatacgtcgttaaacccgggatgagctgaaagctctgaaaaataaacccgaaatggtcaagccgaaattgcgcccattccttttcattaaaccccgtaacatcagtgccattaatgacaatccgcccttttgtcggcgatatgtagccggaaattaaattcaaaagcgttgatttccctgagccgcttcgtccgacaatgcaggcgatttcccctttcgccacgctcaatgaaacatccttcaatactggaacttcattctcacggcccttttttccgatcgtgaaagaatggtcgatatgctgaacatcaatcatatgttctctctcccttacaaaagtttcattttttataaatcgcaaaataactaatcaagaaaccgattaccgcacctgtacccatgccaatgagataaccggcaaagctctcgcttgcagtaaatccaaaatagccgaagcccatgattcctatgataataacgatgatctgcaccgggcggttaagcggcttccataagaagaaatatccgtttctttcattagacattttaacaaagctaatatagccgatgatgtaaaaaatgatagtcatgatagccggaatgactaaataatatggtgaattctcagcccatttcgagtctacataaattatcggaatgaaatactgcacccatttaggtactggaccatggataaaatctattgatccgccaaaaaggatctcgaggttgatcgcaggcaggctgatgagcaaaaatggcgaaatggccacggtaaatgagactagaagctgtgcgaaactattgcctgtcaaagctccacccgccataacaagcgaataagccagcatgctgacaatgatcattccaaggctgtaattgtgaaaataaacggcctgatcaggcttcaaaagtatgatcagcaaaacagataaaacataacctatgagctgcggtatcacaatcaccattccgccagtaaggaacttcgcatgaaatatctgccctcttgtatacggaaggcttaatgtaaaatcaaaaaagcccttgcttcgttcaatccctagctggctgaccgccaaaacgactccccaaatccaaaacaatgagataaatgagctgtttaaataatcaacgctgaatacgcaggggccgacccaattttcttttccagtgacacagccttgatagatgagatacatatttaaaattgataatggattacccaatataaaaaccaaaatggtgataactaaggcgactttattctgccgccactctttgtaaagcagtccggaatccggcaactcacttccctccaaacctatggcatttcttacacttttgttttcttataaatagagaagtagctcacaaagaatccagccactgccccaatgatcatacccaaaatataaccaataatggaatgtccggtatagtatccaaataaaccaaatccaaggatgccgaaagccataaccagaatttgcaccggacggtctaatctgttccataagaaaaagtgtccgtttcgttcacttggaagcttcttgaagcttataaagccaatcaagtaaaatagcatgctcattacggctggaatcaataaaagatatttactgttaatcagccattcatttacaacgtaactaatcggtactaggttcgataaattgcttgccagagagaaataactctcaggggaagggaatatttcccatatattcgcaccaaaaacaacttctaggtttccaaccggcaatgcaataattaaatacggcaatatagctgctgaaaacgccgttaacagttgggcaaaagcatttccagttaacgctccggcggccatcaccagtgaaaaagccataaaacttatcacgattactccaatgctgctgtgctcaaaaaagtagacgtgttcagggttatagacaagaatcagcagccatgcaagtaaaaagccaatcaattgtgacagcacaatcacaaaaccgcctaaccaaaattttgtctgaaaaatttggcttctgttatacgggaggcttaatataaaatccatcgtgcctttcgaacgctccattccgaggaagcagaccgccaaaatgacacccggcacccagttgatatctatcagattgcttatggaataattcacaataaaatcacaatattgcgggtcttggcgatcaagacacccttgataagacaaatacgtattaacgatagaaagcggatttgccaatactaaaaacgcgatacttaacaaaatcaccacttgattctgcttccactctcgatagaggagacctcggtctaccatctccgcttccctccaaacttcgcaatgaacacttcttccaggttgacaggaagctcattccacacttttggcttcagctctctcaaaaagctctttttctcctcatcgcttttcggaatcagcactgtgtaaaacacgccggcctgatcgagcatcggaatgttttgctctctgatggccaaattgacatctgtatcgaaggccatttgaattttaatgtattcttcttttaactcatcaagatccatgacgttggtcaggctgttatcttcaagaaaaccaattcggttgcacatccgctctatgtcttcaagccggtgggacgtaatcaggatgctcgtatcacgctctgccacttcatcgaccatcagctgcagcacatcatgccttgtcaccgcatcaataccatccgtcggctcatcaaggaggatcagcgccggtctcgccgcaaacgacagaacgagcgatagctgcttttttaagcctgtcgacagctcacggtattttttcgtttccggaatttcgtatctgttcatcagctcattcgcgtacgtgacatcaaatttcggatatattcttctcaaaatatcgactaactgcttgtatgtatacttatcgtaaaacggattttgaacaggcatgtagatgatattttgtttgactttcgggtgctttttgatttctacgccgtcaaataaaatcgttccgctgtcagcgaaaatgatttgctggattaagcgaagcatcgtcgttttgcccgatccattgcgtccaagcaatccaaagatttctcctttttcgattgttaatgaaacatcttttaatacttgattgccgtcaatcgcttttgacagctgccgcagttcaatcattttttttgcctcccttcacatcagcgctgatttcctttatccattcgtgcagtttttccagctcaacccctgcatagtgtgcatcgatgatgagctgtttgagttgctctttaatcatcgtcatcttcccttcaaccagtgtcgtttttgcattctccgatatataggtccctctgccccgcagcgtttcaataatcccctctcgctcaagttctttatacgctttgctgacagtgttcggattcgcaataatgatcgttgccaattctctgacagaaggaagcttatcaccaggcttcatgatccctttcaaacaaagctctttcatttgctgaataatttgttcgtaaatgggtgttgagcttcttggatcgatttgaatcatttacttccctactttctatacgatctgaaccttttatagataaaaatgatcaattatacttttttgccattcaaaaccgatcatcacaagaacaagaaaaaaagaacaagcgatcacagatgccgcaatcagcattggcacgttacgtttgtttcgttttttatgtttcataactgcctcccttaatgtcaatatataaatgattttatattagtgtctatagtgtattacttcaattagtacacttaatacaataaatactttgactcacaaagtcaatcctttttttacaaaaaaacggacccttttaaaagggtccgttttcctacacatcaagagggtgctgcaggatcatattattttgcaaagattgaagctgaagtctcattctgtacagctgttctctctgctgatcatttgacgacagccatagtttattcaaggcatttaccgcatcttctagctgcatttgtgcatcactatattcttgatcgttataatgctcttgtttagaagcgattttcagctgttcttcagcataatcataggcctgcatacattgctggagatgttcatctactgattgtcttgttgccacagtaacccctcctcttggtaatggaaatcatccatcattcatattgtagcctcatctgactttattcaataaagtaatttatggtcgatattcatttgttctcttgtgaaatgcgtgctacaattttaggatgcaatcgtacgcaaggaggcacatgaattgtgatacagaacaatccttttccttattcaaatacggaaaaacgctatcatacattgaattatcatctcagagatcatttcggccataaggtgtttaaagtggcgcttgacggcggctttgactgcccaaatcgggatggcaccgttgcccacggaggctgtacgttttgcagcgcagcaggctccggcgattttgccgggaaccgggccgatgatttaattacgcaattccacgacatcaaaaaccgcatgcacgaaaaatggaaggacggcaaatacatcgcttattttcaggctttcacaaacactcacgccccggttggggtgcttcgcgaaaaattcgaatcagtgctagcgcttgatgatgtggttggcatttcgatcgccactcgcccggactgtctgcctgatgatgtcgttgattacctggcagagctgaatgaacgcacctatttgtgggtggagcttgggcttcaaacagttcatgaacggactgcacttctgatcaaccgcgcacatgattttaactgctatgtggaaggcgtcaataaattaagaaaacacggcatacgtgtctgctcgcatattatcaatgggctgcctttggaagaccgggacatgatgatggaaacggcaaaggccgtcgcagatttggatgtccagggcattaaaatccatctgcttcacctactgaaaggcacgccaatggtcaagcaatatgaaaaggggaagctggaatttctttctcaagatgattatgtgcagctcgtctgcgatcagcttgagatcattccgcctgaaatgatcgtccaccgcattacaggtgacggaccgattgagttgatgatcgggccaatgtggagcgtcaacaaatgggaagtgcttggcgccattaataaagagctagaaaatcgaggcagctatcaaggaaagttctttcagcggcttgaggaggaatcagcgctatgattttgaagaaaattcttccctacagcaaagaactgctgaaaatggccgcgggagaaggagatattgtcgtagatgcgacaatgggcaacggacatgatacacagtttttagcggagcttgttggtgaaaacggtcatgtgtacgcattcgacatccaagaatcagccgtggccaatacaaaggaacggctcggtgacatgtatcaagcgcgaacaacgttatttcacaaaagccatgataaaatcgctgaatccctcccgcctgaaacacatggcaaagtggcggccgcggtatttaacctcggctatttgccgggcggggacaagtcaattacgacaaacggcagttctacgatcaaagcaattgaacagcttctcggcatcatgaaagacgaaggtctgattgttctcgtcgtctatcatggccacccggaaggcaaagctgaaaaaaacgacgtgctcgagttttgccgggacttggaccagcaaacagcccgtgtattatcatacggatttatcaatcagcaaaatgacccgccatttattatcgccatcgaaaaaaaagctcagatcagcaaatgatttgagcttttttctttgagtttttcatccagaacattttttgaaatttccggtaggctctgccgttgatataaaagaaaagggaggtttttccgctggctttgatcagcttctttgcgagccggcccatttccttttggcccgccactttatcatctgacaaataaacgccaagcaagccgcgattgattaaacgatggaagttttcatgcggaatgccttgtaaatgctcgtcagctttatggataaagtgttcaagccgattcatcatctcttcatgagactgataatacgagcagaaattcaagtctccttccagcaagtcctcctcttgatcaatcaaataatcaagaagaatatgaaggccctgtatgtaaggaaaataactgtcgcggatttttttagcggtgctttctgtgaaatcaggctggaacgaatacgcaaccagacagaaaatgcctaacgttgagcctgcacaggctgaaaattcataccattccatctcaggcagctctgattcatattgagtaaaccacttttcaagccgcggaacacgctcatgctcaataacgtgcttatgcacctgcaaatcgcaataatagccgcacagttcaagcagataaggtttaatcatgtcatagtgctcaatggagccgagaacacgctggcacgttttgaccagttcatgcaaatatccgctgtcatcctgttcttccctgaattgataatagttttgcagttccgccccaactgtcagtgcgtcctgcattgaggcatggagcatccgaaaatcctgcgggtccagcgaggtgctgcggtcacacagattgtccaaataatcactaatcgtttgatacgcgatgataaactcgacacatttctgtttttggctgcctgacaataaggccagtatgccgccgccttcacagtgaaacgttttgtcccgaatacttgcggttgcctgtgctttcaattcactgttatgaatcgattctgatttttgcttccatatgtccagctcttgatgaacgagcggaaaaatatctcgatatacctttgccatcaatccaaaaggatgttccggtactgtcaacacatgcaccccctactagttcaaatatattgatcagtaaacgctcttgctgctttaaaaacatcttctctctcgggttcattgaagatctcatggtaaagcccttcccactctctgtatgctttattataagaagcaacaccattaaaccacttgatgaccatcgttttgtcaacaagcttgtcatcaccggcttgcatcacaagaagcggaactttcaaaaatgcctctgtcggcaccattgccgattcaattgtctttaaaagctctctgtaccatctgacagaaactttcctgacgtataacgaatcattttggtcagcctcaatgacgtcctcattgcgcgtcgccatatcaattgataatcccgaatcaaccttaagtgacggagcgatgacattcaggccttttgatgcaagatcaagcgctttattcactttaatttgcagtccgagacacggtgatgataaaataattcccgtaatcttgggatttctttgctgtttaatccattcaatcgcgaccagaccgcccatgctgtgacctagaagaaaaaccggcagatcaaaggttcgcgctttatctatccaagcatctacttcatcaatgtattcttgaaacgagcgaatatgccctctcgctcttgtcgttgttccctgtccaggcaaatcgcccatgacaacgtgataacccgaagaccgccacatttcaatcagccatttatatcgtccatgatattcacttgccccgtgaatgattacaatcacggcaacaggtctgtctgctttccaggtccacatgatcttcacctcatacgaaatttaaatagagaaagaaggatgaatcttatgatctacccttataaggaacacaagccagatatccacccaacagcctttatagctgataatgcaacaattaccggtgatgtcgttatcggagaacagtccagtatttggttttctgttgtcataaggggagatgttgcgccgaccagaatcggaaacagagtcaatatccaggatttaagctgcctccatcaaagcccgaacaagacgctgctcattgaagatgacgccacgataggccatcaggttacacttcatagcgctgttatccgcaagaacgccttaatcggcatgggctcaatcattttagacggagccgaaattggcgaaggcgcttttattggtgccggcagtcttgtcccgcccggaaaaatcattccgcctggccatctcgcctttggccgccctgcaaaagtcatccgccctttgacggaagaagaccgaaaagatatgcaaagaatacggtcagaatatgtagaaaagggccaatattataaatttcttcaacaaacataagacctgcttcgtcttactttaccatttttcaaattatatttgaaagcaataaccatcgttaacccggacgtcataacagttcgggtttcgatttttccataaaacgttcacatatagcatgaaacgtatgacttttatcttatcacaaaactataaacagcctctgcaaaaacacatacctattctttcctgttctctattttctatgagcacacacaaaaagagcccactgggagctctttttgtcagctgatatttcgttcgctggcagctgctgcattttttttgtgaaacccttttccatagtacacagccagcaagatgagaaaccatatcggcccgataatcacggctactcttgtatcaggactgtaagccataagaatgacaacgaatgctagaaatgccaatgacacataagacgtaaacggaaataaaggcattttgtactttaattgtttcttttcttcaggcttcaaacttttcctgtattttatttgagaaagcaaaatgattgcccacgtccaaatcgctccgaacgtcgcaatacttgtaacccaagtaaataccttcgcagggacaacatagtttaacagcactccgactaataaagcgcccgctgaagccagaacagctttacccgggatgccgcctttcgtcagctgaccatatgcttgtggcgcctctttctgttccgccaagttaaacagcatccgccctgtgctgaaaataccgctgttgcatgaagacagcgcggctgtcaacacgacaaagttaatgatacctgcggccgatggaatgcccactttttgaaatgtgagaacaaatggacttccttgagagccaatttcctgccacggataaatagacataatgacaaataaagcgcctacataaaaaatcaaaatccgccaaaatactgtatcgattgctttggctaacgatttttgcgggttttttacttcgccagccgtcaccccgatcatttcaatccctaaataggcgaacatgaccatttgaagagacaatagaaccccttttaaaccatgagggaaaaatcctccgttgttccacaaattgctgattccggttgcaatgcccccattgccgactcctgcaataatcatcaataaaccgacagcaatcatggataagatcgcaacaattttaatcaatgcgaaccaaaattccagctcaccgtaagctttgacagccaggaaattaacacccgtcataatgaccagtgccgataatgcccaaatccagtttggcacgtcaggaaaccagaaccccatatagatgccgacagcagtaatttcggccatacaggtgacaacccataaaaaccagtagttccaccctgttaaatagcctgcaagcggtcccaaataatcacgcgcatacctgctgaaggagcctgcgaccggtttttgaatggccatttccccaagcgctctcataataaaaaacatgaccaggccgcttgcggcatacgctaccaaaataccaggccctgctaattgaatagctgatgcggagccgaggaacaaccctactcctattgcagctcctaaagacattaaagaaatatgcctttcttcgagtccgcggtgcagctcttgtttttgtttttgcatgctttcttctcccctagaaaaaaattcattaaatcatttttctgaatatttcgtatgaattgggtaaaccaatgatgatggagaaataaaaggataacaacaaggctttcgactactcgaaagccttgttgtctgttacacaaagatgacttctttaggctgatggctcagctcttcaggcatataccgtttttcaatattgatgctgtgccagatcataaagattagcacagtccagattttacggctgttatcagccttgtccgcacaatggtcttcaagaagctgaaggacataatccttatggatataagcatccgtttggctttcctgaataatattccgcacccattcgttcatttcgtttttcagccaatgacggatcggtacagggaaaccaagctttttgcggtttaatacgtgctcaggcacaattccttcagcggctttgcgaagaagatacttcgtcgtgccgttcttcgttttcagctcatcaggaatttttgaagcgacgtcgaatacgactttatccaagaacggcacacgcagttccaaagaattcgccatcgtcattttatccgcctttaacaaaatgtcgccgcgcatccaagtgtggatatcgacatactgcattttgttgatatcgctgtacgagctgctttctgtaaagtaagtcttcgtcacatcgcgatatgaaaggttcggattataatgcttcaacagctgctttttgacagactcttcaaagattttagcgttaccgatataacgatcctgaagcggagtgcagccgcgctcaagcaggctcttccctctcataccttcaggcataacggcagcaacgtgcagaagcatctttttcaagccggacggaatccgttcaaacggtttaagcgaaagcggttcacggtaaatgttatatccgccgaagagctcatccgctccttcacctgataaagcaaccgttacatgttttttcgcttcttttgcaacaaagtacaacggaatcgctgccggatcagcaagcgggtcatcaaaatgccatacgatcttcggaagctcattcatgtattcctcaggcgaaatgactttgctgatattttcaatgcccagcgccgctgccgtttctttcgctacatcaacctcactgaagccctgctgttcaaagccgacagagaatgtttttaagcttggatgaaattccttcgcaacagacacaataaaggaagaatcaatcccgccagacaggaacgaaccgacaggaacgtcacttctcatatgaacgtttacagagtcatagatcgcgtctcggacttctttcacaagcttgtcttcttcagtctgaaccggcttgaagttcgctttgaaatacgttttgaatgtgatatcgccgtccgggcggattgtgaactgtgaacccggctctacttttttcacatgggcatcaagcgtgcttggttcaggaacaaattggaaagacatgtactgctgcaatgcctctttatctatttcaatatcattctgagcaaccattaaactttttctctctgaggcaaaataaacctgatcattgatcgttgtgtagtacaacggtttaatgccgaatggatctcttgccccataaagcacatgatcgtttttattccaaatcagaaaggcaaacataccgcgcagtttggacgccgcttcttctttatagtgacagtaagtcgcaagaagaacctctgtgtccgaatccgtgttgaatgtgtacccctttgcttcaagctcttctctcagttcaatatagttatagatttctccgttaaagataatccaatatgtttcatcttcatatgataaaggctgtccgccattttctacatcaataatgctgagccgtctgaatccgaagccgacgtgctcatcatggaaatatccatcactgtcaggaccgcggtgaacgatcatttggttcatttgtttgattagttcttcttgatcagcggtttgagctaacggatgcttgttaaaaaccccgacaaatccacacatagtattgcctccataattaaaattgtcatcattgaacccctatttatagacgctgtgaataatatttggtttcacagttatgtaaaaaaataaacatgaatacaacgataaaaaagggaaagccgcttaaccagtaagcggctataaaattattctcctaacgcttctttacgcagctgctccgctttgtctgtacgctcccaaggaaggtcaacatcgtgacgtccaaagtggccgtacgcagcagtttgtttgtagatcggacggcgcaaatcaagcattttgataatgccggcaggtcgtaaatcaaagttattgcgaacaacttcaatcagtttttcctcagaagcttttcctgaaccgaatgtgttgattgagattgacacaggctgtgcaacaccgatcgcgtaagcaagctgtacttcgcaagaatcagcaagctcagccgcaacgatgtttttcgcaacgtatcttgccgcataagctgcagaacggtctaccttcgtcgcgtccttacctgagaacgcgcctccgccgtggcgtgcatagccgccgtacgtatcaacgatgattttgcgtcctgtaagtcccgcatccccttgagggcctccgattacgaaacgtcctgtagggttgatgaaatattttgtttcttcatcaatcagctcttcaggaacaaccggattgattacatgttctttaatgttgcgctgaatttgctcaagtgtaatttcagggtgatgctgagttgaaataacaatcgcgtcaatgcggactggtttgttattttcatcgtactcaaccgttacctgtgttttgccgtcagggcgaaggtacggaagaatatcttctttacggacttcacttaggcggcgggctaatttatgggcaagtgaaattggaagaggcataagctctttcgtttcgttgcacgcataaccgaacattaatccttggtcacccgcaccaatcgcttcaatttcttcgtcgctcattgtgccttcacgggcttcaagcgcttggtctacgcccatcgcgatatcagcagactgctcatcaattgatgttaaaaccgcacaagtttccgcatcaaatccgtattttgcacgtgtgtatccgatttctttaatggtttggcgaaccgttttcggaatgtcaacatacgtagaagttgtgatctctccgcttacaagaaccaaacctgttgtcacagatgtttcacaagcaacacgcgcgttagggtctttctttaaaatttcatctaaaatgctgtcagaaatctggtcacagattttatccggatgcccctccgtaacagattctgatgtaaataaacgacgatttttactcatgatttgcttcctcctgcacaaggcctcccgaaagaccttgtatatatgatacggaactcgctccctcttatacaatgtacagttatattagagaatgttaattggcatatttatgaaataaaaaaaccttttccatcgaggaaagggtttggtctttgtgcctttcactcttatcgctcaaggaatcatacaaccttgcaacaggttagcaccttggttgtctcactcagttgaacataataaataacagagaaaccggttgctgggcttcatagggcctgtccctccgccagctcgggataagagtatccgctcaatgaaatatcttatcgtaaaagggtttgcaatgtcaatatgattcagaagaaataggcacctatattgagggaaaacaatggaaatgcacacacaaaaaacaataaatagtatagactatttgaaaatatatgttatactaattcacaattagcaaaacacaaaaaacgataaaggaaggtttcatatgaactcagttgatttgaccgctgatttacaagccttattaacatgtccaaatgtgcgtcataatttatcagcagcacagctaacagaaaaagtcctctcccgaaacgaaggcattttaacatccacaggtgctgttcgcgcgacaacaggcgcttacacaggacgctcacctaaagataaattcatcgtggaggaagaaagcacgaaaaataagatcgattggggcccggtgaatcagccgatttcagaggaagcgtttgagcggctgtacacgaaagttgtcagctatttaaaggagcgagatgaactgtttgttttcgaaggatttgccggagcagacgagaaatacaggctgccgatcactgtcgtaaatgagttcgcatggcacaatttatttgcgcggcagctgtttatccgtccggaaggaaatgataagaaaacagttgagcagccgttcaccattctttctgctccgcacttcaaagcggatccaaaaacagacggcactcattccgaaacgtttattattgtctctttcgaaaagcggacgatcttaatcggcggaactgagtatgccggtgaaatgaagaagtccattttctccattatgaatttcctgctgcctgaaagagatattttatctatgcactgctccgccaatgtcggtgaaaaaggcgatgtcgcccttttcttcggactgtcaggaacaggcaagaccaccttgtcggcagatgctgaccgcaagctgatcggtgacgatgaacatggctggtctgatacaggcgtctttaatattgaaggcggatgctacgctaagtgcattcatttaagcgaggaaaaggaaccgcaaatctttaacgcgatccgtttcgggtctgttctcgaaaatgtcgttgttgacgaagatacacgcgaagccaattatgatgattccttctatactgaaaacacgcgggcagcttacccgattcatatgattgacaacatcgtgactccaagcatggccggccatccgtcagcaattgtatttttgacggctgatgccttcggagtcctgccgccgatcagcaaactaacgaaggagcaggccatgtaccatttcttgagcggttacacgagtaagcttgccggaaccgaacgtggtgtaacgtctcctgaaacgactttctctacatgcttcggctcacctttcctgccgcttcctgctcacgtctatgctgaaatgctcggcaaaaagatcgatgaacacggcgcagacgttttcttagtcaataccggctggaccgggggcggctacggcacaggcgaacgaatgaagctttcttacactagagcaatggtcaaagcagcgattgaaggcaaattagaggatgctgaaatgataacagacgatattttcggcctgcacattccggcacatgttcctggcgttcctgatcatattcttcagcctgaaaacacgtggaccaacaaggaagaatacaaagaaaaagcagtctaccttgcaaatgaattcaaagagaactttaaaaagttcgcacataccgatgccatcgcccaggcaggcggccctctcgtataaaaaacaaaagccaagagcaattatgctcttggcttgttttaattgacggaatgcaaagaagtcagcttgtatgtaatgatggtccggccttcttcccattgaagcttctgcacttcagctgtgcctgacttttcgccaaactttgttttgcgtacatccattggaatctccatcggatatactcggtatccgtccttctctaacgtgaatatattttcatctatgcgaacttcttttccttttgtcacaatcagtgtattaaattcaacaggcattcccaaagtgaaatcccctttcgttctcttttttctttatcataacatatttcactgtcagcggtttttcatccattgtgtgagctgccgcacgatacgccggttttcttttggcgggaaataatgtgtgaatgtactgtagtaccacgtctccaccggcttatgcagttgttttagcttctcttcaaataaataggaatgctgaattgaaacattttggtctttttctccatggattaacagcacgggagcctgaattttgtttacttggtcaaacggtgtcctccattgatattcctcaggcacctttttcggtgttccgccgatgactcttttcatcattcgccgcaaatcctgccgctcctcgtatgtaagaatcatatcactgacgcctccccaggaaacaaatgaagctgcctgcccgcccatttcgatcgcagtgagcattcccataattccgccgcgggaaaaaccgaagatgtggattctatccttcttgacatttgggtgctgctgaagcaggcgaaaagcagaaaatgcatcctccctgtcttctcctgcaaaatcctcattgccttctcctccttgatttcctctgtaaaaaggagcaaacaccacaaacccttgggatgcaaactggataatccggcccggccgaaccatgcccacgcttttaatcccgccgcgcaaatataaaaatccgtcatattgtcccggttccgccggctcagccagaagccccttaacccgtaatccatttgacagatagcagatcgtatacaaacgcacatgctggcttggcgacggaaatcttcttttctctacaatcaaaacagccgcctcctttttttctatatgctttccttactccaaaattacatccggagaacctggttaggcattcacacatttttatacccatcatacgatatgtaaagcaaaaaaggatattaacttgatgcgaaataaggaggttgtctatgtgaacagatggttaaggctgagcttcgcctgtgtcggcagtatctttctgatgttcgccctggcggcttgcaagcaggaagaaacgctcacaaaagtcaaggtcgctgaagtgacccattcaattttttacgcacctttatatgttgctgagtctaaagggttttttaaagaagaagggcttgatgtcgatgtgaatacgacctggggcggagataaaacgatgacatcgcttctttccaacggctccgacatcgcgcttgtcgggtcagaaacatctatttatgtcgaagcgcaaggggctaaagatcccgtcattaatttcgcccagctgactcagacagacggaacgtttcttgtcgcgagagaagatgttgaacacttcgactgggatcagctgaaaggaaaaacgtttctcggtcagcgaaaaggcggcatgccgcaaatggtcggcgagtatgtactgaacaaacataagattgacccgcgtaaggatatagacctcatccagaacatagacttcgccaatattgccaatgcgtttgcttctggaaccggtgagtatgtacagctctttgaaccgcaggcttctctctttgagaaaaaaggcatcggccatatcgtggcttcattcggagaagaatcaggagaggttccttatacgacttttatggcgaaacaaagctatttgaagaaaaatgaagacacagccgtcaagtttacaaaggccatttataaggcgcagcagtgggttgaaaatcattctgcgaaggacatcacagatgccattaaagatgaatttgatgataccgacccagacgtcatcgaaacatccattgaacgctataaaaaacagcattcatattcgccagaccctctgcttaacgaaaaagaatgggagcttctccaaaccattatggatcaatcgggagaactgccgaagcacattccatacaatcagcttgtaaataaagaaattgctgaaaaagtcacctcggagaaataggaggcgccatctatgtctttcttacatgtcgaccatgtaacccatacttatttttctattaaagaaaaaacaacggctgtgcgggatattcatttcgatgccgaaaaaggcgatttcatctcatttctcggcccaagcggctgcggaaaaacaacactgctttccattattgccggtttgattgagccatcagaaggcagagttctgattgaaggccgtgagccgaatcaaaaagaacataatattggctatatgcttcagcaggattacttatttccctggaaatctatcgaggaaaatgtgcttctcggtttaaaaatcgccgacacgctgacagaagaaagcaaagccgctgcactcggtctattgccggagttcggcctcatagatgtggagaaaaaatatccgaaagagctgtcaggcgggatgcgccagcgggctgcgcttgcaagaacacttgcgcctaaccctagtctgcttttgctggatgagccattttccgcgcttgattttcagacaaagctgtctttggaaaacctggtattccgcacattaaaggaatatcaaaaaacagcagtgcttgtcactcatgatataggggaagcgatagcgatgagcgatacgatctttttattttcaaatcagccgggcaccatccatcagatttttaccattcctaaggaattggccgcaatgttgccttttgacgcccgtcaggaaccttccttccagacactgtttcaaacgatatggaaggagctgaattctcttgagaaacagcaaagaaaccattgatctgcttcacgagcagtatcaattcaaacagaaaaaggaaaagtggaaggtccattcctttcagcttgccatatttattctctttttctcgggctgggaaacctccagcaggcagggctggatcgatccgctgatcttcagctctccatcagctgtgtggcgattattgctggagaaacttggtgacggttctttactgtcacacatcggcgtcactttatttgaaacggtgcttggctttttgcttgggacgtttatgggcacgtgcctcgccgctttgttatggtggtctaaccgacttgccagaattttagatccgtaccttgtgattttgaatgcaatgccgaaagtagccctgggcccgatcctgattgtcgcgctcggtcccagttttatcagcatcattgcgatgggagccatcatcagcgtcattatcacaaccatcgttgtctataccgccttccaggaggtcgacgaaaactatacgaaagtcatgaaaacattcggcgcaaaaaagtgggttatttttaaagaagtcatactgcctgcatcctcccccgcgattatttcaacactaaaagtgaacgtcggtttatcatgggttggcgtcattgtaggggaattcctcgtttcgaaggtcggattaggatatatgattatttacggattccaagtcttcaattttacactcgtcttcttaagcctgctgatcatcgccatcttcgccactctgatgtatcagggcgtcgagctgctggaaaagaaatggacgaaggggaggacataaaaaacccggcacatgtgccgggttttttattcaatccatccagattctttcagttttttcaaactgatcggaagtacggaatccttcataataaagctgaattttttattgcgggaaaggttctccggaagctcgtgaaacaaaaccgggcctttcgtttcaaagtaatcagcttgcttttcaagcttttctatatctgcaaaatatatatttttcacaatcactttttcttttccgagaactttatactgtccgagatacttgaggcttttgactctcgcgcccgtctcttcctttacttcccggagcgcagcctcttctgcgcactccatcggctctactttcccgcctggaaactcatagcctctgtcctcatgttctgttaaaagccatttgccgccaaaacggcaaatcacccagacatgcttcgggctgtccgagaaaggctgatcgtcaaaggaaagctgaacagtattctgataataatctttaaactcgtacatgtttatccctcaaatccgttcctagctatcttccatacatcataccacagttacgtttcttcggaagccttttatcaaaaaataagggaaacccagcacgccgtcaggttctgcatgcagactagctcgtacagtttttttgcgatagcttttgccgaaaagtgcgaccgacgctctgggctttattatgacccgcgaacagggaaaagttacggtttgcgcttaaatttattttttaacgtttctaaaagatcgacaagcatctgaggaaccggtatgccaagagaactggctgtcacaacaatttgcacagattcataaagaatataaaacataatagccaagtcacgaattgatccctctgtattcagcagctgatcaaaaaagtggcatacagagatcagagccagcgtgactaattttttgacaagccgggcaaatacctttttaaatgacagtttgtgaataatggtttccttcaaagtcgtactgataaattcaattgccataagagagagcaaaatcagaaatgaatactgaaaacctccaaagaaaaaacccgctgctgaaacgctgactgctattaacgaaaagatgccaaagtctctatccatttatcccaacatcctttcacagaaacggccttacgatattctatggaaaacaagccgaacggattggatttttcagaaaaatggactggttgtcgcctatttttcagatacaaaaagaaaagccggacgtcttttttaagacatccggccgttctttttttggacttaacctaggtaagcttttagcatccagttatgtttttcaatattttgatggatcgcaagaagcatgtcccctgttgtttcgtcaccgacttcatcagctaaatccatgccgtttttcagctcttccgcgatgactgtgaaatcatcatatacgctttgaaccatttgttcagctgtttcatttccagccgcttctttgacagaagccgtttctaaggattccttcattgttgcaatcggttttccgttcagcgccaaaagacgttctgctaagtcatcaatataagttgccgtttcgttgtacagctcctcaaacttttcatgaagagtgaagaaatcttttcctttcacataccagtgatagttatgtagtttcacatacatgaccgtccagttggctacttgtttgttcactgcttgaatcaattgttctgacatggtatctcctccttgttatatgactatgtatacccttaatatcgtacgctaaaacctcttttttacccttatctgtcacgatttcttctattatgctacaattgttaaaaaacgggaggtggaatgtcatgacgcttctcattacgataagtattttgattgtgctggctgttttgcttgtaaccatttggacgactgtaaaagcctataatgtaaagcataccattgatccaccacaagaaaatcactctgattcacacaatcaatgatgatgtgaatgttcctcttctgactgattgctggcagcatcggcgtctccgacttggacttttaaggtcggcatgctatgctgtttttttgctgtgacatgggattggacagtgtatacaccatcttccttaaacgtcgtttccaatcggtatacgcctttttcttgtttcgccttaaacatttggcttgcgtctttttccccttctttccatacttcaaactctacttcatcggcatccgtcacagcttcatcaccatatgatacggctgcttcataagcagcgctttctccgggatttactttttcaggcccggtcagcttgacatccaaaacctcgggcgtctcagctgtatttgctttgctttcaccagatccgcatccattaagcaataaagcagaaaaaagcagaacaaccaacatctttttcatgccatcaccctttcatcgtttacctaaatagtagcaaacgcttacagcaaatggtacataaaatatgagacgtcacaaaaaagacctttttgcttatgcgcaaaaaggtcctttctattttagccaaatacttttagcaattcttctttatcctgtgaaagccagaaacgcattaaacgtttagcgccttccagatcatgaagcttcgcttggccgcactgcttttcattcgcagctggtatttctgtaatctctaccgcttccttcattgtgtcttcaagtagatcaacgatttccgctgatgtcggctctccgctcacaactagataatagcctgtctggcagcccattggagaaatatcaatgatatcaaaatgatcgtatttctcagcgtgagaacgaatcgtaaacgcgagcaaatgctcgagtgtgtgaatggtgtcaggcttcatcgcctgtttatttggctggcaaaaacgaatgtcaaatttatttacaacgccgtctgttcctactttatgcacgccgcaatgtcttacatatggagcaacaaccgcattatgatcaagctcaaaactttctactgaaggcataatggcactctccccttttttaaaaatgtaatttcattataacatacttttccgataagaattattgattaacttttcaatctgtgttttttttcttatacttgcatcagaaaggttgctgaagaaacatgaaaaccctattcatcgctctgatcagaggatatcaaaaattcatctcgcccctgacaccgccaacgtgccgcttttatccgacctgttcccaatatggaatcgaagcgattaaaacacatggcgctttaaaaggcggatggctgacaatcaaacggattttgaaatgccacccgttccatccgggaggagtcgatcccgttcctgaaaagaaacaaaaacattaattgttataaccgtttacgataagatccagttttccggttttaggatcaatgactaagccatggaccggaacgttttcagggaacagcgggtgatgtttaataacgtctacgctgtctttcacactcgcttccactgaatcaaagcttttaaaccattgatcaaagtctacaccggagtactttattgtttcgatgcgttcttccggaatccctcttgctttgattttttcaagcatgcttttgctgctgattttgctcatgccgcaatcgtgatgcccgatcacacacacctcatctgcattcagctcgtacactgcgacgagtaaacttctcatgatgcttccgaatgggtgtgtcacaagcgcaccggcacttttaatgattttcacatcaccgtttcgcaaattcatcgcatgcggcagcagttcaaccagacgagtgtccatgcaagaaagaatcgccatttttttatctggaaattttgatgtttgatacttttcatactctctttgttcagtaaatgtcttgttaaattcgagaatatcatttagaagactcatgttcgttgtccctttctattctttttactcttcaatatatcacaacccttgtttattcgtcataataaaaaaagacaaaccctctggtctgccttatttccccatgttatagcgttttttgaactgctcaactcgtccgcctttttcattgaatttctggcggccagtataaaacggatgcgtgtcagagcttacttctactttaatgacaggatatgtgtttccgtcttcccactctgctgtttcattagatgttttcgtagaggtgctgagaaaacggtagccgctgttgacatcctgaaatatcactttgtggttcttcggatgaattccttctttcatgtgaatctcctttcaataaatcgtaataattacgttttattctataaccttacaaacgttttgtcaatcttcttatatccttccctctgttttcacatcgtaaacctcatggcatttaagaataggaagaataatctaaccgaggaagcaaataataaacccaaaatacatacagaacgtctttttagaaaggtggtttacgattgtggatgatttagttttggccagaagcctctttggcacgacaatgggctttcatattattttcgcaacgcttggagtcggtctcccgctcatgattttagtggcggaattgatctatcaaaaaacgaaagatgaccattatgcgatcatggcgaaaagatggacgaaagcacaagccgttttgctgggggtcgccataccgaccggaacgatcgcgggcactcagctcgcgcttttatggccgggatttatggaagtcattggccgggtgatgtccctgccatttcaaattgaaatctatgctttttttgttgaagccctattcatgtcgatttatgtatacgctgcagaccgtttgtcacctgcaatgaggattgttgctgttttctttgtgttagtcggggcagcagcatcagctgttctgattacgaatgttcacgcttttgaaggaacgcccgccggttttaaaattttaaacggaaaaattacagatgttgacccgtgggctgcgttttttaatcctagcttttttatcactgccggccatgtcgtgctgtccgcgtttatgaccggtgcatttatcgtggcttctgttgcggcgtataaaatgatccggacgaggaaaaaggaaaaggtctatcgctttcaccggaaagcccttttgctcgcactgacgatcggcggtattttttcattgctgaccgctttgaacggacacgaatctgcacagatgctgtacgaataccagcccgaaaaattagccggtgcggaaggcctgtttgaaacaagatcccacgccccgctcgctatcggcggttttaccgacccgaatgaagaaaaagtaaaatgggcaatcgagattccatgggctttaagctttttggcagcgaaccgttttgacactgttgtaaaaggattaaatgcatttccgagagatgaatggccgccgcttttcattcacacgctgtttaatgcgatggtcggtgtaggcatgctgcttattctttattctattattggtgtggtctggagaaaggtgctcaagaaagaccgtttcccaacgtggcttttggtcattttcatgacagcaggcccttttagtctcatcggcattgaattcggctggattttcgcatgtacggggaggcagccttgggtcatctatcatttgctgaaaacatcggatgtcgtaacaacgactggttcgatcggagtgctcttcttgtttttcacatttgtttatgccgtgttaggcgctgctgtcgtctacgtgctgctgtactatttccgcaagcacccggttgacgaagatttaaatacagcggagtcgtaatggctccgcaaacaggaaaccaaatggaaggagatcgacaaatggagatttcaactgacgctctgatcgccatctcaattatctggggctttgtgtttatttacgccgtcatggcgacaatggattttggagcgggattttggtctatgatctatttaaacaaggagcatatgaaggccaccgatattgcgaatcgctttttgtccccgacttgggaggtcacaaatgtctttattgtggccatcgtcgtggcgcttttcagttttttccccggcgcgacatttgtgctcggcaccgttttattaattcccggaagcatgattttactgcttttagcgattcgaagcggatttctcgtgttttcaaatacagcaaaggagcggaaaacgctaagatatatttccggcatctccggctttatcattcctgctattttaattttggtgcttcctgtgacacacggagggtttatagaaaaaacggatggaatctataacttaaatatgtctaaaatcttttcaagccccaacgcctattcatttatcgggtttgcgattttaagcaccttatttttgtcctcgctgctgcttgcagatgtttcaaatgtggcagaggaacaggatgcgtaccgagcctacagaaaaagcgccctgattaccggcccgatttcactgttgtttgcagtatgcattatggtgacaatgcggaatgaagcaaactggctgtacagcggaatgatgaatgattttacttggattattgcatcgttcattacatttgtcattgctggaatcgccctttttctgcctaataagagctttgggcaaaacatcggaaaaccgcggcttgcacttgtcgcgattgggatacagtattttctcgcaagctacgcgtacgggcgggcgcatcttccgtatatgatttatcccgatgtgacagtcatgtcaggcttcacagagccagcaacgttcagagcgctgtttgcaacgtatatcgttgcatttatcattctatttccgggcttctttttcttctggaaaatgtttatgcgagataaacgctatatccgccaggaggaatagagggcaagccagccggctatactaatccagaacctttataaggaggggatggcatggagcagaaaattctatgtgaggtcaacaactgttcttattggggcaaaggtaacaaatgcaccgctgatgccatttatgttgtcagccatactggtgaaacggctgaaaacagccgggaaacagactgcaaaacgtttaagccgcatgatttgtaattaaaagaaagagctgcatcagccagctctttctttttgcatgttgagtgttctcagctttttagttatgaccccgtttgcaggtgaaaacaaaaaggcgcttgcataacatacacctgtcatggccgccatcgctcctgaaatcgaaacattaagccacgttgcgaagaaatagcccatgaccgccgacagcccgccaatcaacgcgctgagaatcagcatataaagaagccggtctgtcagcaaatgtgccgcagccggcggaacaatcagcatggccacaaccaatacggcacccaccgaatcaaaggaagcaacagtcgtcaaggacagcatgcccatttgcacgtaatgaatgagcaaaaccggtattcccaaggctaaagccatttgaggatcaaacgaagcgattttaaactccttatagcacacactgatcaacactacgtttaaaaccagaacagatgccagcatccaaaacgctttcggcccaatatcaaccccgaataccgtcaccgtattccacggcacaaaagcgatttctcccattaacgagtgctcaatatcgagatggacattcgctccatacacagaaagcaaaataaccccgattgcaaataaggatgtaaacacaactcctatggcagcatctgattgaacccccttgctatgaagaagctgaaccaagaaagccgttaacagaccggttgcggctgcgccaataaacatataaatcccatcgagacttcccgtcactagaaaagcgccgacaatgccaagcaacactgtatgactgattgcgtcggccagcatcgccatgcttctcagtacaagaaatgtgccgatcaatccgcagcttacaccgactaatacaccggtagctataatccatgcttcaaaactcattcgcgatctgtcccttctcggcatcatgagacacttttcgaagctcaggcatccgtccatacagctttaagagtgaataaagccgctctctcgtttctctcggtaaacggtccgggtcaaagtagtcctgatcggattctatattggcaagttccatttcatgcatgagatacacttcatacatccgctgcttcaaagctgtgtgatagcctttttcaatccctttgcttgtgatttgccaaatcccattttcgatacgctcaatgcacctctcttgttccaagtcatttaatgccttaaggcataatgaaggggataggcgtcttttctttcttacactttcaacagttacacaaagatttttcttttcatactgttcataaatcgccaaaagcacttgctccctgcttgttctgcgccgcagcctcatcagccttatggctttagcagccaatccccgcttaggcgcgcaaatcattgaaaaaagaaagagcagcgttgcagataagatcattaatggccctgtcgccattcccttcatcgtggtgctaagcagggttccggccactccgctgaccccgcctgtaatcccggcaatgatgatcatcccggttaatcgttcggtccaatatctcgcggttatggcaggtgtaatcagcatagccgccattaatatcacaccaacagtctgaagcccaatgacgacagcacagacaatcagacaagccaaaagcccgtttaaaaaacgcaccgggattcctaatccctttgcaaacgcgagatcaaaagtaatcaatgtaaattccttaaagaaaacaatacataggagcagcagagcagcggatatccctgcaataaggatgatatcctgcctgaccaatgaagcagcctggccgaataaaaaagaatcaagcccgctttggcttcccgccccctgttgctgaatatatgtcagcagaatgatcccgacgccaaaaaacacagaaagaacaatcccgatcgccgagtcctcctttgtttttgaaagccgaggaatcagctgaatacaaaacgttccgagcagtccggcgagcgctgcccccagcaaaaagaaaggcagtgatttttgcccggtgaacagaaaagcgagacacactcccggcagagctgaatgggccatcgcatcgccgattaaactttgctttctcagcagcacaaagctgcccaaaacaccgcttgccgtcccgagcaaaagcgtaccggccagcacccactgtgtattcggatgctgaagctgcagccacaaactttcaaacattgcgctcactccttatgtccttctgccagcactttatcttttaaaaacgtaagccttcctccatatgttttttgcaggttttcgatcgtaaaaacgttttccgccggtccgaaagcgattttccttaaatgaagcagtaagatccaatcgaaataatcctcggcggtctgcagatcatgatggacgacaagcacggtttttcctttttctttgagctctgccaacagcgtcataatcgcgcgctccgtcgctgcatcaacacctgcaaacggttcatccataaaataaatgtcagcgttctggcagagtgcccgggcaagaaacacccgctgctgctgtccgcctgacagctggctgatttgcctcttcgcataatcatgcatcccgacttttgttaatgcggccttcgccatctccacatccgctttctttggcctctttaataaaccgattctcccgtatcttcccattaggacgacatcgagcgggcttgtggggaaatcccagtcaaccgagccgcgctgcggaacatatccgattctggtccgctgatccttatagtctttgccgtaaatagagatgtctccggaagctctgggcacaagaccgagaatcgttttgatcaaggttgattttcccgcgccgtttgggccgataatgccaataagttttccttcaggcacctgcagcgaaatgtcctgcagtacaggctttttatgataagcaaccgtcacattatcaagctcaacagggaacatatcctccacctcttttctttatttaagcgctttagtaatcgtgttgatattgtgacggaacattccttcgtatgtgccttcttttgtgcccttttcacccatggcatccgaataaagctgaccgccgattgtgactgtatggcctttttctttagcgccttccaccactgcattgattgatttttcagatacactgctttctacgaacacagcttttatttgtttttctgtcagaagatcaaccagctcctgaacatcccttaatccatagtccgaatctgtgctgagtccctgcaggccttttaccttaaatccatactcattcccaaagtacgcaaacgcatcatgagcagtcacaagcacacggcttttctccggaatatgtgcgatctccttacgcgaccacttatctaaatattgcaaatcttctttgtactctttggcatttttccgaaaggcatctgcgtgctgaggcattgctttgctgaattgcgcttcaatttcatccaccgcatagatccataacggaatgctgaaccagacgtggggatcaaacgtcttgccttcccccgcgggaataagcttatttttcggaatggcctcagctactgccgccgattgtttttgttcgccgattttttggaggacatcctccattttcccttccaaatgcaacccgctgtacagaacaacatcggcagacattaattttttcgtgtcaccttgggaagctttgtaaaggtgcggatcaacccccggtcccattaaagaggtgacttttacatgcttacctccgatgttttctgctgcatcggcaatttgagatgttgtcgctgtcacttgtaattgctgatcagcgctttttccggctgaatccgttccgcatcccgttaaagcaaaggtcgcaaaaagtactgctgccatcagcccttgtctcatatttctcctcctctttgccatcaatgtccgattgttttatcttatgttgtcagttcttagacatgtgacattaaattagccaaaagcatgttttatttacacaggacaaaaagtttcccttatgcaaaattatcgcgtttggccatttttgtcaagctgatttacataaaaaaaccggctgggtcagcagccggtccaaacgagaagggatgtattcaacgaacacttttactgtaacagcacagtgtcatttattcaaaatagcaaaatgcttttttcttaaccatgctgtgtgaaaacatccattttggtcacatattttcgcataatatcttggtttacctcaacccctaaaccaggctgttttgacacagaaataaatccattatcaatacgaatatcaggagttacaatatcttcatcccaatagcgtgaggatgaagatatatcgccaggtattgtgaattgaggcagtgaagcaagcgccacgttctgcgctcttgatatgcctgtttccagcattcctccgcaccaaacctgcatatgatgctctttgcataaatcatgaatttttaaggcttctgttaagccgccgacacgagaaggttttatattaataattttgcagcttcctagctcaatcgcccgtctcgcatcatcaactgaacaaatgctctcatcaaggcaaatggccgttttcaaatgtttctgcaagtggcggtggtcaacgatatcgtcagcttggagcggctgctcaatcatcattaaatgatagtcatcaagctcctttaaacggctgatatccttcagttcgtaagaggaattggcatcggccataagcgggatgtttgggaatcggctgcggatggccttgaccaattccacatcctgcccaggctgaattttaatttttattctttgataaccttctttttgatagctctcaatttccttcagcatatcgtcaagaggcgccaggccgactaccaccccggcagggactttatctcttgttccgcccaatgcctcagcaagggatacgcccttctttttggcataaatatcccatacagccgattcaagtcccgcttttgccatccggtttcctttataccgcgccaggctgtccggcacttctgaagggtgattgaattcacggccgacgacatttgggataaaaaaatcttttagcatatgcaaacatgttccaatggtttcctcggtgtaccaaggcgaagagaaagcggaaacttctccccagcctgtgacacctgatgtatcaatggcttccacgatcagaaatttacgctcttgaagcgtttcgatactgtttttaaacggtttctttaagttcatgctcaaatggtaaagcgtgattttttctatttcgatcatagcagttctcctttacgcgcatccttcagctgatttcgcaagagcttattagacgcattgcgcggcaggcggtcaagcacaaagaattttgccggaattttatacttcgccaagcgttctttgcagtagtcagtcaattctcctgcgctcacaggcttgtgaaggacaagataggcgtgaggcactttcccccattttttgtcctcagcccctgaaaccccggcttcggccacagcggggtgtgaaagcagtactgactccacttcggccggataaatgttttctccgccggatatgatcagatctgaacgtctgtctaatacatataaaaagccttcattgtccaaataaccaagatcacctgttttcagccagccattttgaaaggaggcttcgtttgcgctctcccggttaaaatagcttttcatgacattcgggcctttgaccatgatttcaccgtgttcatacggttcacatacctgtccgtcccgctctattttgatttcacatgaaaacagcggtttccccgcagatccgagcttttccatactgaattccggcgacagggtaacaatttgtgagcatgtttctgtcattccatatgactgaaagacagggaatcctttctcacggcattcctcaagcaatggcagaggtgcagggccgccgccgagaagaatgcatctgatggattcagggcagcggcttgtttcttccaaaagactggccagcatagtctgcaccgcagatatcattgtcacttcatgcctgttgatagaattcagcacatcgcttacggaaaaacgctggtgaagcacgacagtcattccatagatcacagatttaaataatgcggacaatccgctgatatgaaagagcggcaatgcgataagccagcggtcttgttctgttatacccaaattaagcgcggacgacaccgcactgaaatagtggtttccgaacgtttgctgaactcccttgggctttcctgtcgtacccgacgtatacatcagcgttgccgttgcatccatttgcatataagcctcgatctcaatttcctctgctgcttctttcatcagttcatccacatcaatcgtttgaacgatgtgttgatattctttcttctcaaagcttgaatctgtcaataaaaagccggatcccgaatcctccagctgaaacagcctttcatgtgttgacagcttcgtattcaaaagcaccgccttaacaccaagcaaaaaacaagcgtgaacagcgtataccatttctgcacggttttggagcaaaatagctgcagtatcccctttccgaaccgaatgagcggcaagctgttccgccattcgtttagacgcggcaaacaattctgcaaatgtcacggtttggtcttcatagatgagagcgattctctcaggtgtcagctgtgcccgctgcatgagccagttgggctgttctgtcagcatgtcatcatctccgaggtaaaatgtctgtattgaaaagaaaacagcttggaccgcaaagtctcaagctgttggtttactaggtattgctgatcacggaaaacgagggaactgtccgaaatcaggtttgcgtttttccttaaaggaatcacggccttcttttgcttcatctgttgtgtagtaaagaagggtagcatcccctgcaaactgctgaattccagcaagtccgtctgtgtccgcgttaaacgcagctttaagaaagcgcagtgcggtcgggcttttttcaagcatttcttcacaccatttaatcgtttcttcttcaagctgttccaaaggaacgactgtgttgacaagacccatgtccagtgcttcctgtgcgttgtactgacggcataggtaccagatttcacgtgcttttttatgtcctacaattcgagccaggtagccagaaccgtaacctgcatcgaagcttcccactttagggcctgtttgtccaaaaattgcgttgtccgcagcaattgtcaagtcacatacgatgtgaagcacatggcctccgccgatcgcatatccggacaccatcgcaacaaccggtttcgggatgacgcggattaaacgctgaagatccaatacgttaagacgcgggatctggtcgtctcctacatatccaccgtggccgcgcactttttggtctccgccagaacaaaatgccttgtcccctgcaccggcaagcacgataaccccaacgttttggtcgtctcttgcgtcagcaaacgcatcaatcatttcagcaaccgttttaggggtaaacgcattatgtacctcaggtcggttgattgttatttttgcaatgccattatacgtttcatacaatatctcatcgtatgtccgttttgttttccattcagccatatgatgacctccttttattctctatgtgaatgagtcagatgcttgtcaaaaactcactcactattttaccaaacaatcgcggctgttccacatggaccgtatgtcctgcttttggaacaatctctattctactagaaggaagcatcttatgcacctcttgattgatggcgcaaaatttttcgtcccactccccgcagataagaagcacaggaacatctatttcctctacacggctccacaaggaaggctgtgaaccggtgcccatgccggttaaactgttcgcaagcccaatcttattgttccgcagacggcccgatcgtatcctgtgccgaatatcttcagccagcctctgctgagatgaaaacaaagggatattctcccaatacgcaacaaacgctttgagcccgtctcgtaaaataaaatcagcaagcttccggtcccgcatgattcgttcccgccgttccccaagtgttttgagccccggcgtcgtgctttcaagcacaagtgccgatacccgctcgggatatgtcatcgcgaaagagtaagcaagccttcctcccatagaatacccaatcaatttcactttgtgaagttttaattgatcaaaaatctcggcaaggtcagaaacttgccggcttgtgctgtatcttttcccattcagcggggcatcggtttccccatgccctaaacaatcaattttgatcaaacgggaatcaggcagcatttcatcaagaaaagtccatgattgtttgctgccggtaaacccgtgcagacagacgacggcttcggaagcattcggtccctcgtctgccactgcatatcggacaccatctgataccgttatgtttacagttcccattgttttttcacttcccgcacagcctcattcagcatatcgcgatgaagctggactcttgattggcgatccgttttgatttcaatcaaatggagtccgggcttgtctgcctgcggcgcgtaagctgttttgaattcatcccaagaagccgggcatgaatacgttccgccgtaaagtgcagcggcatgcttgaaatcgagccctgtcggtgtgccgaacaaatcttcaaagtgtgtcttctcagaagcctgcggcaaaaaggagaaaatccctcccccgtcattattgacaagaatcacagtaagtggaatacccagctttttggccgccagcaagccgtttaaatcgtgataaaaagataaatctccaatcacaagggtaacaggcgcttttgttccttcacatacccccatggcagaggagacgacaccgtctatcccgtttgctccccggtttgaataaatccggaaagggcggtcctgcttttcgaaaaacgtatcaacatccctgatcggcatgctgtttcccacaaacagcgagctgttttcaggcacaagatgctgaaggattcgatagagattgccttcaaacgaaacatcttcactgctgattgtttgcagatgctcgcggaaccgcccattgacaaactgccacttttccagccactctgaggatctggcagcagcagtaaggcctcccatgatctcctcagcaaaaacagacgcattacaatgaatcatatgcgcgcttgcctgtgtcgggtctctccaccctccatcctcgtcaatcactatttgctgaatcgcaggatcatccttaagccataagaaaaccggttttgaaacaggcatcggtccaaaccgaatgacaacatcaggacgaagtttccgcttcagctcatcatcttttaaaaacgaatcatacgcatcaataacagtgcttttatcatgaacaccattccgcagattagacagcggatccgctaaaattggatactgaagcgcttttgacagcgcaataatgttttccttatccgcatcactatggagctccccgcagacgatcattcctttttcagcctctgcgagcatctcagccacatcagacagggactctcggtcaacagactgcgtacccgttttcacagacacatgacggcctgttctcattcttccaaacggctcatctgaaagatccggcatcagcggttcgcgcagcggcacattcacatggacaggccccatcgggcgcttttgtgcttctccggcagcgcggcttgccagcgttcggatgtatctcagcatttgcggagactcttcaggaagagcagagtctgtgaaaaacttaacaaagttaccgaataagaagtgctgattaatagcctgcggtgcgcctacttcgcgcagctcatgaggccgatcagcagttaacacaataataggcacccttgaataatgggcttcaaccacagccggataaaagttggccgcggctgttccagatgtacagatcaatagtacgggacgctgcttcgcttttgccaaacctaaggcaaaaaacccggcagatctttcatcaatttggacatggacgctgatatcgggatgcgcagcacaaagaacagccagcggtgtagatcttgagcccggacaaacgacggcgtccgtaattccggaaagggcgaattcatcaataaaacttccgatgtaatgagtaatcgggttgactgtcaacgcctctcacctcctaatgcagagatcatcggcttcaatttaatctgtgtttcttcatattccgagattggttccgagtcttccacaataccgcacccggcaaacagccttgcagtgcttccttcgatcagccctgaacgaatggctaccgcgaattccccgttatcctggctgtcaatccagccgataggggcagcataccagccgcgagacatcggttcaatctccctgatcacgtcaacagctttttcctgaggtgctcccccgagcgccggagtgggatgcagcttctcaattaagtcaaaaattgaagcagactcgcgcagctgtccgacaatcggcgtaaacaggtgctgaacgctttttgttttgtacaaaacaggtccatcaggcttttcaacctctgaacagcttgatacaaaagcattatgaatcatacctaccacaatatcatgctcaagcaggtttttctcatcgtttaataattcaaggcctatccggcggtcgtcttcttcattcacgcctcgtttaatggagcctgccagacaggaagacatgacagtgccgccgtctcttttgatcagtctttccggagacgcgccgacaaaggttttgccttcttgttcaattgcaaaaacatagcttgtctgctgatcgtccagaagcgttttaagcaccggttcaatttggattggaccgtcaaacgtgagcagcagctctcgggcaagaacaaccttatcatattgtttctctttaatttggcttgtggccgtttcgattgctttcagccaatcatccttatccagctcttcggctgctgcaatcacagcctgatcttcttgcttgaaatcgggaaccataaattccgccgcaaaagcttttaagccttctaaaacagcttctgcgtcttctcctccgcttacccatctgttaactgttaagaacgggccttcagcagtcatcgtcagcataagcgcaggcacaaagaaatccccttccgagaaatggtcccattgtgaacctctttcttcgcaagggtcaaaagaaaatcctccgaataacacaggtcccactgcagaatgctgcagcttttcttcttcataaatatgaaaagccgtctttttaaagcgctcccattgttcaaaaacctcacgataccgctcgctgtttttttgatttgtctggaaaaccgcttctttgccaagaccgactattgtcaattcactttcaggatctgaccaaaaaaatcgattgcctgtatatttttttgctccgtaattgaaaaatgatagagggtcaagagactcgatttgtctcgaatagcttattaagacagcatggttgacttctttggctttatgtaatgcatgtagaacttcctttcggaacgtacgctgcaccgttgtcaccatgagacattcctccataatccttaaaatgcttttaataccatacacctgtgtctcctttgtgtcaaacacagatcatgcagtccaaatggcctgccttacctattataaacctaatttcagaaatgaaaaagaaacaaagcttaaatttctttctccactgatagcaaaggttgtatccgcttaccataaaaggaaaacctcctatattcctccacccgccatttatgaaagttctcaggcgatctgttcatactaaaggtatgcatcacagagaaacgaggcgatcacattgcttacgaaagaacagcttcagcatttaaaaaatgaactggaacaaacgaaaaaagatatcttaaaccgtttcaaagacaatgaccattttcagcttaactcagcctttccttatgattcgtggggtgagctttcggcatacgacaaccatcccggcgatcaggcgacagaactttacgagcgtgagaaagacatcgctctagacttgcatgagcgagagcaccttcgggacattgagcattcattgaaggcgatagaaaacggtacgtatggcatttgtgaagtcagcggaaaggaaatccctttcgaacgacttgaagcgcttccgactgccacaaccctcgcggagtattcgtcacaggacgtggtttccaaagaccgtccgattgaagaagaaacaccattcgggcaatttgaatttgatgatgatgaagaaatcagagcgccatatgacagtgaggattcctatcaggatgtcgaaaaatatggtaactcacaaacgccgcaggatatggaaaaccctccgctcagctatgatgatatgacgatgaataccgaagagaatatcggcaatacggagtcttacgaaaatttcatcgctacagatatcactggaaaagaaattaccgtttatcaaagcagagcccatgagcgctatgaagaagaacttgacgaagagggaatcatgaccacattcggcgatctccacgctgattgaacccccaattattgggggttcttttccgttttcagcatatcgtaaatcagcttcagataatccttttgcaggccgatgtcataccgctcgccctctagcaatttcccgtatacggtacatgccccgagcgaagcttttatcgcatccgttacctgcacttctcctccgctatcagcttctaatgcctccagctcattaaaaatatccggtgtgaaaatataacgccctgctgcggcaaaatgagacggagggttttgtttaggcttttccacaatatcctgtatgcgataaagccctttttcaacaggctccccttttatcaccccgtaatgatgtaaatcctccgtttttgtttcttttaagccgatcacactggactgatatttcgtatacgcttcaatcagctgccccaaagccggctgattggcggaaaaaatcagatcatctggcaaaacgacggcaaaaggctctccgcctgcaaattgctttccgaaagaaatggcgtcgccaagaccctttgcataaggctgccgcacatagtgaatccgtatatccggaatgggatgctctctaagtaaatgcagtttattcttagaggccaaaaaagcctcaagtgccaaagaggaatcaaaatagtcgacaatcagatttttatggctcgatacaaccatcaaaatgtcctcaatgcctgactcctttaattcttcaacaagataatgaatcacaggcttagatcctaccggaaacatttctttcggaatcaccttcgtcaccggcagatttctcgtgccgaatccgcctgcaggaataatcgctttttttatcatggtattttcccctcagctcatgtttattacatgatattccaagagcgcatcccgatgtttgtacatctgaaattaggcggaagcaactgggcagaaagcggaatcacgaaccagcccttttttaataggatattgatatatgaccagtaatcttgtaaaggagctcaggtgatgaaaatttgtgtggttggcgccgggtatgtcggtttaaccctatcagcggcactggcatccatcggacatgacatgatatgcacagacaaagacgtcaaaaaaatcgggcagctgaaaaaaggagtcattcccttttacgagcctgggctttcagatgcaatacttcgttgcggcaatctctcgttttcttctgaagtgaaatcgagcatggaggaatgtcccgttatttttatcgcagtcggaactccgccgcgttcggacggatcagctgatacgaaagccctgcagtccgtcatcggtgatttaagcgaggcgatccgatcgtataaaaccattattacgaaaagcactgttccgcccgggacaaatgaaaacatagcaaaacagctgattgcctccggagtgtctaaaaacctctttaatatcgtatccaatccggagtttctgcgggaaggcaatgccttatatgacatgctgcatcctgacaaaacagtcatcggtgttcaggaagaagatcacgtatcggcagccatcgtcaaatccatttacaaacacattgataccccttttatcgttacaagcttagcgggagcagagctgatcaaatatgccaacaatttctttttagcggccaaaatttcgtttattaacgaaatggcccgcatatgtgaagcctatcaatcagatatctcagatatttcccgcgctatcggtctagacccaaggatcgggaagcactttttgcaggcaggcatcggatacggaggctcttgttttccaaaggatctgcaggcgctgcaatttgctgcccaggaaaaaaacacggagaccttcctgctccgggccgtgcagcacattaatgacacccagctcggcctgtatatcaaaaaaatacagtcattcttcgaaacacttcaaggcaagaaagcggctgtactcggcatttccttcaaaccgaatactgatgacatcaggaattctcaggctgtcagactgatggaaaggctggcggagctgggatgtgatgttcatgcatatgatcctgaagctgtacttccagaacatttgcggaagcatgtaactcagcattctcaagcttttgatgcgatcgaagaaagcgactttttatttttggcgacagaatggcccgagtttttagcgtttgattggaaaaaggctgcagatatcatgaaagggcgtcttgtgatagacgggcgcaacgtactgaaaaaagaactgatcgagacttgcggcctgatctgtacgggagttggccgtccatgaaaatactcgtcacaggagcagctggctttatcggctcccacctctgcgaagaattactaaaagataagaaacataacgttatcggaatcgatgactttatcggtcctactccattttccttgaaattaaaaaaccttaaaaacctgctgccggaaaagcgatttacgttcataaaggaaaatctgctgacagccgatcttgctcccttactggaaggagtggacgtcatctttcatttggcggccataccgggtgtccgctcaagctggggcaatcattttcacccatatgccgcacataatatccaggcgctccaaaggctcctcgaggcgtgccgggaacattctattcaaacgttcgtctttgcatccacctcttccgtctatggcgaaaaacaaggaaaagtcagcgaaaacacgtcgctttctcctttatctccgtacggggtaacaaagcttacgggagaaaagctttgccatgtgtatcaacagagctttggtattccaattgtgattctccgtttttttaccgtatacgggccaagacagcggccggatatggcttttcaccggctcattaagcagcaccttcagcaaaagccgcttaccattttcggtgatgggcagcagtcaagagatttcacttatatcggcgactgtgtcaaaggcatcaccgctgttcttgggaaaccccaccttattggtgaaacagtaaatatcggcggcgcagagcgtgcctcagtcttaaaggttgtctccctcattgaggatatttccggtagaaaagcaacactgcacttttcggacaaaatagcaggggaaccgagcaacacgtgggcggatatttcaaaagcaaaacagctcttgcattatgatcccgccacatccttaaaggatggcttgaccaacgaaatcgcctatttatcgtcgctgtatcagggggaataaaaatgaagcttgcctttatctgtacagaaaagctgccggcgcccgcagtacgcggcggcgctattcaaatgatgattgacggtgtcacgccctatttcagcagcaggtacaacctgaccattttttcaatagaagatccatcgctcccaaaaagagaaacaaaagacggcgtacattatatccatctgccaaaagaacattaccgcgaggcggtagccgaagagctgcgagcctcttcctttgacctcattcatgtgttcaacaggcctttaaatgtctctttatataaaaaagcctcaccaaacagcaagatcgttctgagcctgcataacgaaatgttttctgaaaaaaagatgaccttcgcgcaaggaaaagaagtactcgacaatgtctccatgatcacaacagtgagcgaatttattaaacaaaccgtcattgaacgtttccctgaagccgaggacatcacaaaagttgtgtattccggcgttgatttaaactcttatccgcccgtatggacgatgaaaggctcggctgtcagaaaaacataccggaaaaaatacggtattgaagataaaaaagttattttattcgccggccgcttaagcccgataaaaggacctcaccttctcattcacagcatgagaaggattttgcagcagcaccctgatgctgtactggtcatagcgggcgggaaatggttcagcgatgacagcgaaaaccaatatgtaacctatctgcgcacgctggcgctgccatacagagaccacataatctttacaaaattcattcccgcagacgacatcccaaacctttttctgatggcagatgtatttgtgtgcagctctcagtggaacgaacccctcgcccgtgtgaattatgaagcaatggcggccggcacgcccttaattaccacaaatcggggcggaaacggagaagtcgtaaaagacgaagtcaccggccttgtcatcgacagctacaacaaaccttcttcatttgcaaaagcaattgacagagcctttacagatcaagaattaatgaacaaaatgacaaaaagcgcccgaaagcatgtagaagctttatttacctttacccatgctgccaaaaggctcaatactgtttaccaatccgttctgaccccgaaaaacaaacaatttccgccgccttttctgacgcaaaattttgatttatcatctatcaatcagctttttgtgaaagcaaaaacataaaacctacagctcgtgttgcaaaacgggctgtttttttgctgcagaaaacataaaaaaaggcataaatgtgactttatgccttgcgctttacggtttgagaaaaccatggagctggtttagattcacttggaagaatgatgatttccactttagcttcttccgctaagtctggttcttcatcttcatcctcttcttcatatggggacactgagcgtttcgaatcacgctcctcctcaggctctagaatggtttcgaatttcgtttcttcttcatcatcgacgattttgtgatctgtttccttttccttcgtttcttcttgatattctttcggtgcattgatgtgagggagctctcgaatgctgcccacatctaaatgcttctcctcttcttccttctcagctgacattgagtcatgagcctgccaccccatcggcccaggcggtgtaaatacgaattggtcgagatccagtttagaaatagaggctttttgtctcgatgacctcatgtcaattcgcctcccgatacgcttttatctttttatacagttccggcagtttatccaaaaacgaatctttagattcttcaacagaaatcatgttttgcagcgcccagttatatttctcatctgaccacgttttcttttgcttcaaataatatttgtgcccgattgcacagaacaaatgcggaaacgcgagatcaatccaaagtacctcgtactgtttttctgtgagcggatacactgcgtcgtaggccgcaagcagtgcgaccatgaaatcagtatcccatacagaaagcttaaccatcactttattcagcagaatacgaaggtctcttgacggcaaatcgtaggtaatcgagtgaagctcctttaaaaaaggctccccttcgatctctgtcaaacgtgccaatgtaaaatcttgaaaacagaatccgccatgctcgagcgtttcttttgtccaggtttcgtattctgagtcatcaagcgcctgaagagcttcttttcctcttgccagcattttatcagcatgttttaagaaagtttgcgaaaatacgtcatcaggataggatgccgcgatctgcatattcccttcaagttcctgcagcttccatcggtacaatttatgccattttcccagcctgcttctcttcttgctttcatctgtgcaaacatatccttttgaggcatgatgaaaatggccggcaaatgacatgacttttttcatttgctctgcatcatagtaaatcatttcttttcctgtcactttgtcatataagctgtaagaaacctgatccgtgcccaagcagctcccgccattttttgtttgatgaatcggcgctatcggcagccctttctcttgtaaatgagcgtgtgcctgagtgataaaaagcatccgctccggtttcatttgcgcttcttttagcagctttgggccatgatcagtttcgacttcccagattttgcgcccgcttttgttcgatttcagcgccacatggtcgatatgaaacggataatagctgagaatttcggacacaatctgttcttcatgctctttttggtacactctgttcaccccttctatctgttcttttcatagacgctgagcagattttcagccaccctctgccagccaaaattgctttctgcctcacggcggctgtatttcccaagccgttcccgcttttcagagctgctcagcaaatcattgatacgttcggcatattgtttaggattttcaaagtcatgaatgatgtagccgtttttcccttcctctatgacctctggattgcctccccgattgcttgtgataattggaagtcccgcagccatcgcttcataatgcacccttgctaaaggctcctgccattgcgaagagcatacaaatacatctgacatggtataaaggcgcggaatgtcctttggcttcacaaattgaataaatgtgacatgatccttttgcatcgcaccaagggtatgaagatgtttgacatagttatttaattcattatctccgaaccattttgacccgataaacaccatcatgacatcggggtgctcctcaatgatgtccggcaaagcctgcaataatatgtgcgggcctttgactttgctaagccggccgacaaacaagacgatttttttgccgtgaagccccagctcgcttcgcatctcttcgcgagctcgctgcccttcattcgtccagcgagggtggtacgtttttaaatccacaccagaatacaccgtttttgtttttgatcgtgctgacggaaaacggcttgtgatcgtctgtccgatataatcgctgaccgtaacaatctgcgctacggagtcgatgcaaatctcgccttccgcctggctgattttatcgtaagcgaacatttcattgtgaacgcttaaaataaaaacagcatccggcgcctgtttcttcaatttcggaacccagcttgggcgattacaaacatgcacaagatcaaaacggctctttttcagctctgctccaacggcttcttcataacggtcttcatccaaatgcacataatggacaccgtctaccttctctctatcagcgagattcggatctttaatagaaaacacagtcacctcatgtttttttgcaattaaaggggcaaccgcttcgaggtagatttgaatggcgcctcctcgaaccgatgggacaggaagcttctctgtggcgatcagtgctattttcatacatagcctccattcctgcatgatttttaactagttagaatcatgatacggctgaacaaccaacttgtgcggaatgggactgccctaaaaacaaaacgggtaaacaaccagattcatctattaaatatagtcaaataactcaatcattttttccttttgattcataaggtaggagtaaaacaggtaaggatgtgtcctttaatggcagaaaaccatgaagtcattgaggaggggaattcatcagagcttcctttatcagcagaagatgcaaaaaaattaacggagctggctgaaaatgtgcttcaaggatgggatgtgcaggctgaaaaaatagacgtcattcagggaaaccagatggcgcttgtctggaaggtccacacagactccggcgcggtttgtctaaaacgaatacacaggccagaaaagaaagcgttgttttccattttcgcgcaggactatttagcaaaaaaaggcatgaatgttcctggcatactcccaaacaaaaaaggcagcctatattctaagcacggctcatttctatttgtcgtatatgactggatcgaaggaagaccgtttgagctgactgtaaagcaggacttggagtttatcatgaaaggccttgctgattttcatacagcttccgtcggatatcagccgccaaatggcgttcccatatttaccaaattaggtcgctggccgaatcactacacgaaacgatgcaaacagatggaaacgtggaagctgatggcggaggcggaaaaagaagatcctttctcacagctttatcttcaggagatagatggctttattgaagacgggctgcgcatcaaagaccggcttttgcaatcgacctatgttccatggactgaacagctgaaaaaaagccctaacctttgccaccaggattacggaaccgggaatacactcttaggagaaaatgaacagatttgggtcatcgacttagataccgtatcatttgatctgcctattcgcgatttgcgcaaaatgattattccgcttttggatacgacgggtgtttgggatgacgaaacatttcatgtcatgctgaacgcatacgaatccagagccccattaactgaagaacaaaaacaagtcatgtttattgatatgctgtttccttacgagctttacgatgtcattcgcgaaaaatacgtccgcaagtctgctttaccgaaggaagaattagaatcagcttttgaatatgaacgcattaaagcaaacgcattgcggcagcttatttaagaccatcatttcccccgcatatcgggggtttgatctttataagataaagggtaattaaatacatgcggaggttgcaaatatgaaaaagattgtcggcgctttagccgtttttgtgattacatatgcgctgttttcagccgcaggctacctgtttcctgtggaccaagaatggtacaattcattgaaaaaaccggactggacgccaagcggaactgcgatcggcatcatttgggccatcctgtttgccctgatctccctttcagcagccattgtatatgctgcgttttcatttaaaggtgcgaaaagcttttggtttacacttttgataaattacgtgctcaatcaagccttcagctatttccagtttacgcaaaaaaatctgctggctgcatcgcttgactgcctgcttgtcgccatcacagcaatcgtattactgatcattgccaaaaaatacagcagagccgcaagctatcttcttttgccttattttttatggagtgcatttgcgacgttcttatcctttacaatcaattcaatggatctgtgaacaaaaaaagccgcttatacagcggctttttcacatcatcggcttgatgccccaaatgtccttcgcatattcccggatcgtgcggtcgctggagaaatatcctgaatgagcaatgtttacaatcgaacgctcagaccatttccttcgctctcgataatcagcttgaattcgctcctgcgcatctgcatatgagctgaaatccttcagcacaaaatactcatcattatgcggaagcagcgagtcaaagatcgattcaaattcatctgcttctccttcaaaaaaaccattgatcagctgatccgctacctgcctgattcttctgtcatgctgataatattccctcgatctatagccaccattttcctgatacgatagaacctcatccgcctttaagccgaacgtgtaaatacagtcagggcccacccgctcaaagatctcgatatttgcgccgtcatgcgtgccgatcgtcaaagccccgttcatcataaacttcatattccctgtaccagacgcttccttgcttgcagttgaaatttgctcacttacgtctgatgccggaaaaattcgctcagccatagaaactctataattttctaaaaaaacaactttgatcagctgtttgactgccggatcataattgactttttctgcgacagaatggatcagcttaatgattttcttggcataataatagcttggtgaagcctttgccccgaaaataaaggtttgcgggtagattgaaaacccggcgtcctccttgaggcggttatacaaatacataatgtgaagaacattcagcagctgccgtttatatgcatgaagccgtttcacctgtacgtcgaatatgctgtcagggttcacaaccaccccggccgtgcaaaaaatcaaatcggcaagctcttgttttttcttgcttttgttgttttgaaactgttcaataaatgcaggatcagtggcgtacggttctaaacggatcagtgattccggctgtttgacccattcatcgccgatcgcctctgtaatgatggcagacaagcctggattcgcttttaacagccagcgcctgtgggcaattccattcgtcttattgttaaaacgattcggaaacagcaagtgaaagtcgcgcatctccctttccattaatatatcggaatgtatttttgcaacgccatttacactgtaactgcctactatggccagatgagccattttgacaacaccatgcgctgtaatcgccatgtcctctatccttttccagtctcccggatacttttcccaaactgcgcggcaaaacctctcattgatctcttcaataatcatgtacattcgcgggagcagcggcttaaacaaatgaatcggccatttctcgagcgcttctgacaatgttgtatgatttgtataagaaatcgtatgtacagtgatatgccaagcttcttcccagctcatgttctcttcatcgagcaaaatccgcatcagctcaggcaccgcaagcgcagggtgagtgtcattaatatgaatgctcacttttttatgcaggccggataaagatttatgtgtttttcggtaattgttcacaatgctttttaagcttgcgcatactaaaaaatactgctgcttcagccgtaaaattttcccctcatcatgggtgtcatcgggatataagaattcagaaaccgcctctgtttcccgcttataagacaaaatattaccgccgtgataatgcgcatagggctcggcgttccagagccttaacgtgttgacagtgcccgtttcatagccgatgaccgggatatcataaggaacagcggtaacaattgtcgcttgttcgtggcgaaaatgcaggcgcccgcttttttctgtcatatggacttcgccccaaaacggcacgtccactgcttgatccgcattccttacttcccatacgttcccgtttttcagccattgctcaggcagctccacctgatgcccgtctacaattttttgctcaaacaaaccatgcttataacgtatgcccatgccgtgcccaggcaggttcaacgaagcaagcgaatctaaaaagcaagcggccaagcgcccaagtccgccattgccgagacctgcatcgttctctatctgaaggatctcctctaaattgatgccgatttcctttaaaccagcttctacaacatcacgaacaccaagattcattaagttttgctcaaggagctgaccgagcagaaattcgattgataaataatatgtctgcttcccggaatttgatctgcttttttcattcgtttcgatccaatcagcgctgatatactctctgaccatattgcccaacgttttatattgatccagcttggcagaatctttaaagctttttccgcacgtcatttccagacgctttaaaaataagtctgcaaagcgttctttactcgagaacatcccgtccactccttgtcacctgctcgaaaatacgctgatactctttagccgacttcccccagctgtaatctgcattcatagcggtcttcacgatgctcttccatacatcctgttggcaataaaacgacagcgccctttctatcgtaaatttcagatcatgcgcattaaaggcggaaaacgtaaagccattgcccgttccctcttcctcctgataggcacggacagtgtcgtaaagaccgcccgtttccctgacaatcggaatggcgccatattgaagagcaatgagctgccccaaaccgcacggctcaaatttcgacggcatcaaaaacatatcagagcccgcataaatttgatgggctagcggctcatcaaacccgatataagcccggcacttctcatgaaaagcaaattctgcataccggaaataatcttcaaattcacgttctcctgtgcctagcacaaccagctgtatgtcttgctcctcaagaagttcgtgcataattctgcggacaagatcaagccccttttgtttagtgagccttgtcaccatactgatcagcggaatatcgtttttctctggaagccccatccgctgctgaagcttcgttttgttttccagcttgcatgcaagatcccctgaatcgtattgcgcctctatataagggtcgcttttcggctgatagaacgtatcatcaatgccatttaatatgccggttacatcatcttccctatattgcaaaacctgttccaactgctcaccataatacggcgtcatgatttcatttctgtaagtggggctcacagttgtcacatgatcagccgcaatgatgcccgctttcataaaattaacaaatccgttgcattctaacctttcataatgaaaatgatccatctcaagacccagcaagtcatgtgtgacatcaggagggaatatgccttgaaactgcaggttgtggatcgtgagcacgcttttcatccgttcataaaaaggatgttttctgtactcctctttcagcaaataattgaccatcgctgtatgccaatcgtgagtatgaacaatatcggctggaacattcacaactttggcagcctccagcacagctcttgaaaaaaaggcaaaccgctcaccgtcatcataatgcccgtacaacgaatccctgttgaaatagtactcattgtcgatgaagtaataattcacatcgtcttcggccatatgttcaattccgcaatattgctgacgccagccgacagctaccgtacactcagccttttttttcatacgctttttccacggttcaggtatttggctgtacttcggcagcatcacatatacttcattgcctaatcgcgcaagcgccttcggaagagcgcctgctacatcggcaagacctcctgatttcacaaatggggtgcattcagacacagcaaataatatcttcaagaattcatcagctctccttgcaccaaaccttttcttaatacaagcggctgctcagctgttcctacagcttccgtcgccttgccgattttaacgtccttatccgaaatgacctgctcaagaagacaatcctcgccaatctgcgttttttgcataataatacagtttttcagcttcgtaccctttccgacatggaccgccctgaacaaaatgcagttttcaacctctccttcaagcacacagccgtttgccaccaaagaatttttgacagtgctgtgctttccgtatttcgtaggcggctcatccttcacttttgtatagataggctgctgcggcaaaaacacctgctgccaaaaacgaggctgaatgagctccatactgtgggtataatatttttccaccgaatcaatgacagcagcataacctgaatattcataagggcaaatggtcagggcggaagattccttttcaacagcctcctgaatggttttatagcctttttcgctatgtccgtagatcagatcctttaaaagcgttgttgacatgatatagatttgcagcgactggccgtcctgaaatacctcggtgacgtcgcagccaacctcctgatggcgtttcagcacatattgaaattgaatgttgcatacggtatggctgttggagattacagcatattgctgagtgcttctgtggaagtaatctagatggtccgaaaactggcgaaaggaaccgaattcatcgtattcgtgatgaagatggggagacgggaaaaaaaagaggccgtcctttttccggtgcaaatcccattccttacccgccccaaggtgatccatgagcgaacggtaacgatacttcggaaaaattgcaacactcctaatatccgcattcaccatgttggaaagcataaaatcaatcagtcggtacctgccggcaaaagggatcgccccgagcgaccgctttgctgttaaatcctgaagagaatgcttatatgtggtttcatctataacacctaacatttgattattgaacactgactctgccccctcttcagtaattaaatcaattctttttctacaaattcctctgaaacgagcagcacctcttcaatgtctttttcggagcgaatcactgcgccatccggcagcaccatcccattaggaacaatggcattttcaatgactacatgctccccaatcgtcacatccggcattatgacggatgatgtaacagtcgtatgcttaccaacagtcacaccttgaaaaagaacggagtgagacacatttccatatacaacacaaccttcgttcacaagcgaatcttgaacctgcgcatcagatgaaataaattgcggaggctgatttggattgacggagtaaattttccatttgcgttcaaacagcttcagctccgagtcctcttttaacaaatccatattggcttcccacaagctctgcaccgttccgacatccttccaatatcccttgaacggataagcagaaagcttctttttctcttccaaaagcagaggaataatgtctttgccgaagtcgtggctagaataagggttttgatcgtccatctcaagatactgtttcaaaagcggccaattgaatatataaattcccattgaggcaagattgctcttagggaatttgggcttttcatcaaaatgtgtgatcgtcccatctggattggccttcatgatgccgaaccggcttgcttcctccaagcccacttcgatgacagagatggtcacatctgctttcttttcaatgtgataatcaagcattttgccgtagtccattttgtatatgtgatctcctgataaaatcagtacatactcaggatcatactgattcaaataattgagattttcataaatggcgcttgccgtccctttataccacttgacttctgatgactcggcataagggggtaaaaccgtcacgccaccattatatctatccaggtcccatgcactgccgatcccaatataggaattcagctcaagcggctgatattgcgttaaaatcccgactgtgtctatgcctgaatttgaacagttgcttagggtaaaatcaataatcctgtatttacccccgaaagatacagccggtttagccatattttttgttaatccgctgagacggctgcccttcccgccggcaaggagcatggctacacattgttttttcatctttttatctctcctctttttttaaccgcccgtaaaatcgagatgccgtaaggggggatggtcatcgtgatataacacggtttatgatgaagtgctccctttttagccgataatggctttttgttgatttgccctgagcctccatatgtttcactgtcactgttaagcacttcaatgtattgagtaaaaaaaggaactccaacatcatattgatgatagaccacgggtgtaaaattacaaatgatgacaagcgcctcaccgtgctttttgccataacgaataaaagaaaagattgattgttcgtcattatggacatcaatccattcaaacgattgtgcacgatggtcatgctcataaaggattttgcttttttggtaaaagcggagaagatcttgcgtaaaaacgctggctttctgatgcatggggaaggagtccaaaaaccaatcaagctgttctgtatctttccattcatcaaattgggcaaactctgatcccataaagatcaatttctttccgggatgcactgtcatatagcccagcaaaagccgatactgggcaaatttctgccagtagtcgccaggcattttattaagaagtgatttttttccgtatacgacttcatcatgagaaaacggcaatacaaaatgttcactaaacgcatatagtaatgaaaaagagataagctgatgacaatgccgcctttcttcgggcggcgtctccatgtatttcagtacgtcattcatccatcccatattccatttataatgaaaaccaagccccccttcctcaacggcacctgtcacttgaggccattctgtagaatcttccgcaatcatcatcacatggggatatgcctctctcatggtttgattgagtttttttaaaaactcaacagcatatggattcgtgtggcgttcatcctgatttggccaatacaagatattagccactgcatcaaccctaaatccatctatatgatagaattccgcccagtacaacgcattcgaaattaaaaaactatgaacttccggttttcccaggtcaaagtttgccgtgccccataaccagttctcccgatcacgttcttctttgtattcataaagcggttctccatcaaacatatagagtccatgtgcatctttacaaaaatgtccggggacccaatccaaaatgactccgatattttgttgatgacattcatcaacaaacttcatcagatcatgcggcgggccaaacctgcttgtcgggctgtaataccccgttccttggtacccccatgaacgatcatatggatgctcatacaccggaagcagttcaacatgggtaaacccatgctccttgatataagggataagcgtctgacttaattctttataggaataatgcctgccatcagaatgcttcttccaagacccaagatgcagttcataaatgaaaacaggtttttcatacagcgtcttagtcttctgtttcttttgccatttttgatcttgccagctgtacccttccaaatcgtaagtaagtgacgctgtgtttggtctgacttctgaataaatagcgtatggatctgccttcagcctgatctcaccgttattcgtcacgatttcatatttatatcgttccttttctcctaaacctggaataaataacgtccaaataccactatcattcactctgtgcatcacatgctcttctccagaccagctgttaaaatctccagccactcgtacttccgacgcatgaggcgcccacacacagaattcatatccgcttttgccattcagctcgcggtaatgcgagccaaacagctgatagctttcaaacagactgccttcgtgaaaaagataaacatcatgtgctgtcgggctggcagcggccatgtaatcatcctttctgacatcatagttttcatttatagtatttattcgaagaaataaaaaaaagccctttgctgaaagcgcttatacttatagacaattaacttcattttctgaagaaaaacgaaatatatggagatttttgtagtctgcttttaaaataaagaacaaaatctaagacatatcatgatttagaaaacaaaaaaaccttgcaggatatgcaaggcttctggatgacccgtacgggattcgaacccgtgttaccgccgtgaaagggcggtgtcttaaccgcttgaccaacgggccgataattattatacctgtaatcatatggcggagaaggagggatttgaaccctcgcgccgcttacacgacctacacccttagcaggggcgcctcttcagccacttgagtacttctccatttggctccacaggcaggattcgaacctgcgaccgatcggttaacagccgatagctctaccactgagctactgtggaatacaaaagtcatggtgggcctgaatggactcgaaccatcgacctcacgcttatcaggcgtgcgctctaaccagctgagctacaggcccatgacgatatagaaatggagcgggtgatgggaatcgaacccacgacatcagcttggaaggctgaggttttaccactaaactacacccgcaatttttatttggggcgattgatgggaatcgaacccacgaatgccagagccacaatctggtgcgttaaccacttcgccacaaccgccaaaatatattgataaatggtggctcgggacggaatcgaaccgccgacacacggattttcagtccgttgctctaccaactgagctaccgagcctaagtatttaaatggcggtccggacgggactcgaacccgcgacctcctgcgtgacaggcaggcattctaaccaactgaactaccggaccattttaaaatttggttgcgggggcaggatttgaacctgcgaccttcgggttatgagcccgacgagctaccgaactgctccaccccgcgatgattaggaatatgtatggcggaggaagagggattcgaacccccgcgggctttgacacccctgtcggttttcaagaccgatcccttcagccagacttgggtattcctccgtatagtggtggaccttgtaggactcgaacctacgaccggacggttatgagccgtctgctctaaccaactgagctaaaggtccattggtagcggcggaggggatcgaacccccgacctcacgggtatgaaccgtacgctctagccagctgagctacaccgccaaatatttttagaaatcaagtggagcctagcgggatcgaaccgctgacctcctgcgtgcaaagcaggcgctctcccagctgagctaaggccccaagaatggtcgggaagacaggattcgaacctgcgaccccatggtcccaaaccatgtgctctaccaagctgagctacttcccgatttcatatagatcatggcgcgcccgagaggagtcgaacccctaaccttttgatccgtagtcaaacgctctatccaattgagctacgggcgcaaaacttaatgccgagggccggacttgaaccggcacggtagtcacctaccgcaggattttaagtcctgtgtgtctgccaattccaccaccccggcgtggatggtatagttggagcggaagacgggattcgaacccgcgacccccaccttggcaaggtggtgttctaccactgaactacttccgcagaaatggtgcggatgaagggacttgaacccccacgtctgtaaagacactagagcctgattctagcgcgtctgccaattccgccacatccgcaacatgtaaatggtgagccatgaaggactcgaaccttcgaccctctgattaaaagtcagatgctctaccaactgagctaatggctcttcttacaagagacttgaatattatatcatataaaagtggtgccggcaagaggacttgaacccccaacctactgattacaagtcagttgctctaccaattgagctacaccggcatatatgtaaaaccgatatgtataatgaaaaatggtggaggatgacgggctcgaaccgccgaccctctgcttgtaaggcagatgctctcccagctgagctaatcctccatacttgcactaacgtgcaattgcttggcggcgtcctactctcacagggggacccccccgactaccatcggcgctgaagagcttaacttccgtgttcggtatgggaacgggtgtgacctcttcgctatcgccaccaaacaaattgagagtgttctctcaaaactagataacaggtgtgacatcattcaaaaatatggttaagtcctcgatcgattagtatctgtcagctccatgtgtcgccacacttccacctcagacctatcaacctgatcatctttcagggatcttacttccttgcggaatgggaaatctcatcttgagggggcttcatgcttagatgctttcagcacttatcccgtccgcacatagctacccagcgatgcccttggcagaacaactggtacaccagcggtgcgtccatcccggtcctctcgtactaaggacagctcctctcaaatttcctgcgcccgcgacggatagggaccgaactgtctcacgacgttctgaacccagctcgcgtaccgctttaatgggcgaacagcccaacccttgggaccgactacagccccaggatgcgatgagccgacatcgaggtgccaaacctccccgtcgatgtggactcttgggggagataagcctgttatccccggggtagcttttatccgttgagcgatggcccttccatgcggaaccaccggatcactaagcccgactttcgtccctgctcgacttgtaggtctcgcagtcaagctcccttgtgcctttacactctgcgaatgatttccaaccattctgagggaacctttgggcgcctccgttaccttttaggaggcgaccgccccagtcaaactgcccacctgacactgtctccccgcccgataagggcggcgggttagaaggtcaatacagccagggtagtatcccaccgatgcctccaccgaagctggcgctccggtttccaaggctcctacctatcctgtacaagctgtaccaacattcaatatcaggctgcagtaaagctccacggggtctttccgtcctgtcgcgggtaacctgcatcttcacaggtactataatttcaccgagtctctcgttgagacagtgcccagatcgttgcgcctttcgtgcgggtcggaacttacccgacaaggaatttcgctaccttaggaccgttatagttacggccgccgtttactggggcttcaattcgcaccttcgcttacgctaagcgctcctcttaaccttccagcaccgggcaggcgtcagcccctatacttcgccttacggcttcgcagagacctgtgtttttgctaaacagtcgcctgggcctattcactgcggctctctcgggcttgcaccctaacagagcaccccttctcccgaagttacggggtcattttgccgagttccttaacgagagttctctcgatcaccttaggattctctcctcgcctacctgtgtcggtttgcggtacgggcacctctcacctcgctagaggcttttcttggcagtgtggaatcaggaacttcgctactatatttcgctcgccatcacagctcagccttatgggaaacggatttgcctatttcccagcctaactgcttggacgcggatatccaataccgcgcttaccctatcctcctgcgtccccccattgctcaaatggtgaggaggtggtacaggaatatcaacctgttgtccatcgcctacgcctttcggcctcggcttaggtcccgactaaccctgagcggacgagccttcctcaggaaaccttaggcattcggtggaggggattctcacccctctttcgctactcataccggcattctcacttctaagcgctccaccagtccttccggtctggcttcacagcccttagaacgctctcctaccactgttcgaagaacagtccgcagcttcggtgatacgtttagccccggtacattttcggcgcagagtcactcgaccagtgagctattacgcactctttaaatggtggctgcttctaagccaacatcctggttgtctaagcaactccacatccttttccacttaacgtatactttgggaccttagctggcggtctgggctgtttccctttcgactacggatcttatcactcgcagtctgactcccaaggataagtcattggcattcggagtttgactgaattcggtaacccggtaggggcccctagtccaatcagtgctctacctccaagactcttaccttgaggctagccctaaagctatttcggagagaaccagctatctccaggttcgattggcatttcacccctacccacacctcatccccgcacttttcaacgtgcgtgggttcgggcctccattcagtgttacctgaacttcaccctggacatgggtagatcacctggtttcgggtctacgaccacgtactcatgcgccctattcagactcgctttcgctgcggctccgcatcttctgcttaaccttgcacgggatcgtaactcgccggttcattctacaaaaggcacgccatcacccgttaacgggctctgactacttgtaggcacacggtttcaggatctctttcactccccttccggggtgcttttcacctttccctcacggtactggttcactatcggtcactagggagtatttagccttgggagatggtcctcccggattccgacggaatttcacgtgttccgccgtactcaggatccactcaggagagaacgaagttttgactacagggctgttacctcctatggcgggcctttccagacctcttcatctacctcgttcctttgtaactccgtacagagtgtcctacaaccccaagaggcaagcctcttggtttgggctaatcccgtttcgctcgccgctactcagggaatcgcatttgctttctcttcctccgggtacttagatgtttcagttccccgggtctgccttctcatatcctatgaattcagatatggataccactccattacgagtggtgggtttccccattcggaaatctccggatcaaagcttgcttacagctccccgaagcatatcggtgttcgtcccgtccttcatcggctcctagtgccaaggcatccaccgtgcgccctttctaacttaaccgttaaaaagaatcactatgtgatatcttgtattactaattgaatgtgatgtctactgttatctagttttcaaagaacacgtttcgaaggaatgatccttcaaaactaaacaagacagggaacgttctgtttataagacccaaggtcttatattccgtataatatccttagaaaggaggtgatccagccgcaccttccgatacggctaccttgttacgacttcaccccaatcatctgtcccaccttcggcggctggctcctaaaaggttacctcaccgacttcgggtgttacaaactctcgtggtgtgacgggcggtgtgtacaaggcccgggaacgtattcaccgcggcatgctgatccgcgattactagcgattccagcttcacgcagtcgagttgcagactgcgatccgaactgagaacagatttgtgggattggcttaacctcgcggtttcgctgccctttgttctgtccattgtagcacgtgtgtagcccaggtcataaggggcatgatgatttgacgtcatccccaccttcctccggtttgtcaccggcagtcaccttagagtgcccaactgaatgctggcaactaagatcaagggttgcgctcgttgcgggacttaacccaacatctcacgacacgagctgacgacaaccatgcaccacctgtcactctgcccccgaaggggacgtcctatctctaggattgtcagaggatgtcaagacctggtaaggttcttcgcgttgcttcgaattaaaccacatgctccaccgcttgtgcgggcccccgtcaattcctttgagtttcagtcttgcgaccgtactccccaggcggagtgcttaatgcgttagctgcagcactaagggcggaaaccccctaacacttagcactcatcgtttacggcgtggactaccagggtatctaatcctgttcgctccccacgctttcgctcctcagcgtcagttacagaccagagagtcgccttcgccactggtgttcctccacatctctacgcatttcaccgctacacgtggaattccactctcctcttctgcactcaagttccccagtttccaatgaccctccccggttgagccgggggctttcacatcagacttaagaaaccgcctgcgagccctttacgcccaataattccggacaacgcttgccacctacgtattaccgcggctgctggcacgtagttagccgtggctttctggttaggtaccgtcaaggtaccgccctattcgaacggtacttgttcttccctaacaacagagctttacgatccgaaaaccttcatcactcacgcggcgttgctccgtcagactttcgtccattgcggaagattccctactgctgcctcccgtaggagtctgggccgtgtctcagtcccagtgtggccgatcaccctctcaggtcggctacgcatcgttgccttggtgagccgttacctcaccaactagctaatgcgccgcgggtccatctgtaagtggtagccgaagccaccttttatgtttgaaccatgcggttcaaacaaccatccggtattagccccggtttcccggagttatcccagtcttacaggcaggttacccacgtgttactcacccgtccgccgctaacatcagggagcaagctcccatctgtccgctcgacttgcatgtattaggcacgccgccagcgttcgtcctgagccaggatcaaactctccgataaatggatcacaggttaagttcaccgcatcctgcggcgacacctgtgtgacctgcgtcgtgcagaccctagtttgactgactacgcacatcgctgtgcgatttttaaaaactgaattaacaggtacgttttgtcttgtttagttttcaaagatcatttcgttacttctcaatgaagcagctttactaatataacattcagcttcttttttgtcaacaacttttttcaagttgttttgaagcatctagtttgtgtccgctgtgcatcagcgacgtttaataatataacacctgtatttatttattgcaatagtttttttaaaaaaatctataaaacaaataaactataatcctcgccatgatttctaaagcgtgtgtatcatataagtttcttaaaagaacatatacatcagtcatgtgatcttgttgtttttttcgttttcttgtatagtagaaacgaactaaatactgatgaccacaaggggagcattaaagctgagagtgagcggtttcgttctgaccctttgaacctgttagttaacgctggcgtagggatgtggcaaagtcaaatgaattgcagatcgtaaagcagtgcgtggaacttttctcatccttccgcgtgctgcttttttgttgtccttttggttgtctgtcaatggaaggagatagatatgaatcaatctaagcaactggttcgccttattgaaattgccattatgacagcggcagccgttattttagacattgtctcaggaatgtttcttagcatgcctcaaggaggctcggtctccatcatgatgattccgatctttttaatttcgtttcgctggggtgtcaaagcaggtcttactacaggtttgttgacaggtctagtacaaatagcaatcggaaacttgtttgctcaacatcctgtacagctattgttagattacattgtcgctttcgcagcaatcggcataagcggctgtttcgcttcttctgtccgtaaagccgctgtatcaaaaacaaaagggaaattgattgtttcagtggtcagcgcagtttttatcggcagtttgctgcgctatgccgcgcatgtcatttcaggagctgtgtttttcggcagctttgctccaaaaggaacaccggtatggatttattctttaacttataatgcgacttacatggttccttcattcattatttgtgcaattgtcctatgtttattatttatgacagcaccccgtttgcttaaaagtgacaaagcgtaaaagtaacaatcccccagcgaattccgctgagggattgttcgttatctgttaagaagtgtttttaaagctgaaagatccggccagccaagacctacttctttcagccttactccggcaatttcaaagttgtcctccgctactctttcaggtgaataggcctgataaaatataattgagggattctgctcaataacccaaacaaacatacttgaaaatccatgttgaagcaaaaactccgctccttttgctaagagcgccctgcctgcaccttgccgctggcgctcttccagaagataaatagcgtataactcgccgtcatagccttcttgttcagagcgaataggtccaaatgaagcaaagccgaatactgaatccatttcgtcctgagcaacaaatactccttttaacgagcgacttttccatttgtcttcaaattccttatagttcaggctgtttaaataatcaatcgggataatttcgtggtatgttgtcctccagctgtctacatgcacttttgcaataccctttatatcctctaacttcgcttcacgtacagttaccatacggttctgtcctttccttactctgatttttggaccgttttggcttctttgatttcatttgttaattcattgatgctttgttttacgtttccttttcctgaaaagttctcaagcatttcttttacatcgattcccgaggatgcttttaaactttcttgcagacttgacattaagttcgtcgcatagctggttactttgtttgctccgcttgattcaccgcttcctcctgtatcgacaacggtgattttatcaatatttgaaagaggtgccgctgcttgtttcgcgtattccggaagcattttgacaatcatatcgaaaatcgccgcctgcccgtactgttcaaaggcggccgcaattttctcttttgcttccgcttctgcaagacctttcaggcggataacctctgcttctgtctctcctttcgctttttccgcttctgcttttgctagcccgtcaattcttactttttccgcctcagcctttgccattgcttcaatactgtacttcttggcatcggcttccgcgagctgtttggctttctcagctgctgcggactgctcaacagaataacggtctgcatcggcttttttctttacctctgagtcgtattgacgttcacggcgaagaatttctttttcttctagttctatttgtttttggcgttcgataattttaacctgcatttcctgctctgtgacttgctggcgcgctcgggcagtctctaaatcatatgcttggtcggcattcgcttttgccgtatcttgttctctgcggaattcagccattttgagctgattgattttttcagcttcagcgatttccgtcgcccgttcaagttctgatttttttgcgtctttatcggcttctgcccgcttaattcgggtttctttatcagcctctgctgttgcgatatcagcatcgcgttttacttgggcaattctcggtttccctaatgattcaagataaccgtttttatcacgaacatctttaatggtaaacgagacgattacaagtcccattttcgcgagatcctgtgaagcgacacgctgcacctcttgagagaatttttctctgtttttatagatttcttctactgtcattgagccgagaatggaacgaaggtggccttctaaaacctcccgcgcttcctgctcacggtcgtcttttgatttccctaaaaattgttcggccgctgtagcgatttctcctatagaaccgccgattttaataatcgcagttccatcggccattactggcactccttgttctgtatagacttcaggtgtcgaaacatcgagtttgcttgataataggcttagcggctctgcctgctggaagacgggaaggacaaaggttcctccgccgcggacgattttaatacggttgccgccttcatcgacatgaacatttttattacccagatagctccctgttacaattaacgcttcatcaggccctgctgtacgatacttcgtaataaacacagctattagtgcaattaataaaaagaatacaactccgatgatcattataatcggcattgtcatatcaaattcctccttttatgttaaatgggttcatgcggagtaaccgaaagaactccgtttttgacatctacgactagcactcttgtgccataaccgatctgttgattttcaaagctgatcgctgacttcgagatggtgccgcctatcccttcaatgaccacttcaccaaacccgtcaacaggaacagctgtaatcactttaccgagtcttcctctgagatcatcttctctatatgccaatgattcttctgcagatgataatggtaccagtacaaagatgtgaagcaataccaccagcatgatcgaaaggatgcaagataaaagcgcaatcagcaagcttgacagaggcaatacgagttcacctatatatccgtccgctgaaaaacatgtgaaaaatgagagcactaatgtcggattaagaaacggaatgccttctggcagccctgcaaatacatctccgaaaaacagaaataacagcgtaaggctgcccgcaataataagcgtataaagataaattgtttgtataggtactccaaataactccaatttcctcatcctttcttcatcaatgcattgatgaacggctgccgttaccattaatacgagacaccccgggaaaagtttcaaaattttaagataagtaacccatttgaagtgctttataaatgataattgcttatatatatggtaatgtcattttaggaggagatatgatgagtatctttaatgaagccagattagaaacgtggaacgaattgaaaggactttctgacgaaaagctgaatcaaaagccttctgctgaagaatggagcatacgggaagttcttgaccatttgaaaaaaatcgatatgaccgcacaaaaaatgttgaaggaacgtgtacaggacgctccgattaaagaaattgaagaaaaaccgcttgaggtagcacaggacagaaataataaacggaaagccccgagtcatcttgagcctgcgcatgattttatttcaggcagccaaatgaaacgtgagcttgatgtggtaagagagcagctgactgctgcgattgcctctctgaaagaagaagattttgaaagagtgcttccgcatcctgtgtttcaagagctgactgtcagacagtggatcgattttatcggccatcatgaaaaacggcacctcagccaaatgaaagaaattaaagaaaagatagaaagggcctgatttaatcagaccctttctgcttttcgtttgacttttcgctgataggaatgaacttctatttcatcacctgtgtaaacagcaccaggtctctccacaatacagacaacccctctaatgcccagtgcgtggcggacgaaagccggcgccagcttcggttggtccggataataagactgaatgacttctcccggctggatacacggatcattttcgccctcacacagcagagccgctccgctcggaaaaataatccggcttccttcttttaatgaagtaagatctggcataccgctgactgccacattcgccccgagccattccggcaaaattctcggcactcccatttttaaagcgatttcgttgcattcctctattgaaacaattgaaatttgtctgcggttgaaaatttcagtccctcttgaaaacattggttctctggctcccgcttttttggtcaggccaaaatgcaagtcgccggggatgccgccataatcaaaatcaagcttgtccatttgctttgttacgaagctttctgtatctgcgatatataagccttccgcttttgcagtcatacgcttccacatcagctggcaccttccttcttatctaaaatttccgcctatgcttcattatcccaaaaaatcccgctctgtaaaggagcgggattttgattataccgttttaggcgtaaggttaaagcagcgcttgtagatccagttgtatgctttttcatttaaatctctagggtttccgaaggtttgcggatctttcattgcttctttagacaagcgttcgatcatatcaggtgatactccctgctcttctaaagtcagcacttctaaatcttcgaccagatcatacatccaattgacagatgctttcgcagcttcttctgttgtcatcttgcttgtatcaataccgaacgctttcgcaatacgcgcaaacttctcaggatagcccttccagttgtattccatgacagggcccatcatcgccgctacacattggccgtgagcgactgggataataccgccaagcgtttggctcatcgcatgagccgcgcccgctgattcacttccgtaagaaaggccggcaagcatcgctgcctgcgccattccgtaccttgcttccagatcctctccgtcagcaaatgccctcttaatgtaatgagcggcatactcaatcgccattagggcaaccgcatccgtgattggctgtgcaaatttcattgtatagcactcaatggcatgggcgagcgcatcaattcccgtcatagctgttacatgcggaggcattgaaacatgaagctcaggatcaatgatggtcaagtgcgctgcaatcagcggaccgcccgtgttgaatttgaattctctttcttcatctgtgataaccgcccattgggttacttctgatcctgttccagctgtagtgggaattgtcgtcagcggaggaatgcggttttccagcggttttttcccatctgccgcttcataatcaagcacgcttccttcgtgagtcgcttctactccgattgcttttgctgtatccatggagcttccgcctccgactgccaccaaaccattacagttctcttttttgtaaagctcagatccttcattcaccagacggacaggcgggtttggctcaactttattaaagagcaccacttcaatgcctgcttctttaagtgattcgattacaggatcagcaacaccggctttataaatccctgggtctgtgacaaggagcgcttttgaaacgcccagtgcagctacttcctcacccgtatgcttgatggctccgattccatgcttaatcacagtcggaatttcaaatgtgtggaatttctgcatgctttctaccttcatatttaatgtcatcatcaatctccccctcttatgaattgaaccagttaaccgctgccggttttgtattacggtatacatgtttgacttctgtgtattcttcaaggcctatttttccaagctcgcgtccgaacccggattgcttatatccgccccatggcgcttgtgcaaagtacggatgaaaatcgttgatccaaacggttcccattctcaagcgggctgctacccgttcgcacttttcaatgtcttttgaccataccgctccagccaagccatagatggtatcattcgcaagctcgattacctcttcttcagagctgaaggtttcgactgtcaatacaggaccgaaaacctcttcctgaacgattctcatgtcagaattacagtttgagaaaatagtaggttcatagaaaaagccgttttgaagctcaggatcttccgggcgtttgcctcctgtctccagcttcgcgccttcctctattccgatctcaacatatttttctacctttgccctgtgctccgccgaaataagcggaccgctttctgtctcagcatgaaaaccgtttccgagttttatgcgttttgcccgtttgaccagctccgccaaaaattgatcatgaatggcatcctcaacaagcaagcgggaacctgcagagcatacttggccggcgtggaaaaatacagcgtttaaggcctgatcaaccgcaacttctaaatccgcgtccttgaaaacaatatttgggtttttcccgccaagttcaagggcgatttttttgacgtttccgcttgccgcccgcatgatttttttgcctgtttcaattccgcccgtaaacgaaatcaaatcgacgtctttgtttacggcaagctcgtcgcccactgtggctcccggtccaaggacaagatttgcgacaccttttggtacaccggcttcttccatcagcttaaagactttgattgtcgtcagcggcgtaatctcactcggcttcatgacgattgtgtttcctgcagccagtgcaggggcgattttccagctcgcttgaaggagcggataattccatggagtgatctggccgcaaaccccgattggctctctaataattttgctttctgaatcaggaatcggagatgaaatgatctctcctccatctttgtctgccaagccggcgtaatattgaaaaacattggcgatatcgtccatatcggccttgctttcttcgagtgtttttcctgtatcaagagattcaagctcagccagctcctcaagatcgcgtctgattaattccgcaattttcagaacaatttttccgcgttcaagcccggatagcgatgaccattctcctttgtcaaatgctctgcgtgcggctgcgattgctttgatggcgtcctctcgccctccctcgcttacagttgcaatttcttcttgattaaatggattgataatactgcggatctgttctttttcggcactgatccattctccgtcaatgaataatgtttgactcatataagcctccttgacgtaaataaagtttgttaaataaaaatttaatgtttttaacaaccttaatctaacatatggtttttaaactgtcaaagtcccattttgatttttctttttgacttttcctcatgtttcgttaagataaagaacataaagaaataacttaacgaatttaattttctaaaggaaaagagggtcagtatggatgaaaatccagaatttgcagctatagaacaggctcgggatcttgttattgactccattgctgaaacgatggatctttacggaattacccgcagtgtcgggattttatatgggacgatgtatatgagggatgagatgacgcttgacgaaatgcgtgaggagttgcaaatgagcaaaccaagcatgagcacaggcgtcaaaaagcttcaagacttaaatgtagtgaaaaaaacatttcaccggggcatccgtaagcatacatttgtggctgagaaggatttctttaaatttttcacaaatttctttccacctaaatgggagcgggaggttcaagtgaatgtagcagcgatcgaggaagctcaagctgatttacaaaaggttttatgcaaggaagatctcgatgaggatatcaaaaatgaagcactgcagttatatgatcagctggaaagctctaaagcttactatgactggctgaaacggcttgctgaatcggtgcagaccggagaaatttttaaatttataccgatcgaaacaaagtaaagcagaaaacgcctgggaaagcaggcgtttttttgatgtaactactacaaatttgaaaaatacgggaaaaacaccccatttacttccaaaatatttgatggtaattttatgtaggtaaaatttgtatttggcctttcagaggaggtgaaaagcgggcaggcctgtttaatttatcattttttagggggaattttgttatgaaacgcaaattattatcttctttggcaattagtgcattaagtctcgggttactcgtttctgcacctacagcttctttcgcggctgaatctacatcaactaaagctcatactgaatctactatgagaacacagtctacagcttcattgttcgcaacaatcactggcgccagcaaaacggaatggtctttctcagatatcgaattgacttaccgtccaaacacgcttctcagccttggcgttatggagtttacattgccaagcggatttactgcaaacacgaaagacacattgaacggaaatgccttgcgtacaacacagatcctcaataacgggaaaacagtaagagttcctttggcacttgatttgttaggagctggcgaatttaaattaaaactgaataacaaaacacttcctgccgcaggtacatatactttccgtgcagagaataaatcattaagcatcggaaataaattttacgcagaagccagcattgacgtggctaagcgcagcactcctccgactcagccttgcggttgcaactaatgtaaaagaccggttaacgccggtcttttttgcgttttaccctcccctttttctctaattcccgttatcttttttctggtttaaaatttaaattgacaaacactagaaacaggagtaaattcttgagtgttcaatttcatacagtctcttttaccgcttaatcaaacacgaacgggggaaccaacgattggctgttttattaacagccttggggtgaatcttactaagtaagagggggtactctgaatccctaatccgacagctaacctcgtaggcgtatacagagaggaggtctattatttggccattctttgcaatggtcttttttgcttcagaaacgttaattcactaagggagatatgaacattgggaagaattaaaaataagcaatttgccgtgatcggtctgggccggtttggcggcagcatttgtaaagaacttcatagaatggggcatgaggtccttgcggttgatatcaacgaagaaaaggtcaatgcatatgcttcttacgccactcatgcggtaattgccaacgccaccgaagaaaacgaattgctttcattaggaatacgcaattttgaatatgtgattgttgccatcggagcaaatattcaagcgagtacgctgaccaccctattattaaaggagcttgatattccaaatatttgggtgaaggctcaaaactattatcatcacaaggtgcttgaaaaaatcggcgctgaccggattattcatcctgaaaaagatatgggagttaaaatcgcacaaagcctttcagacgaaaatgttttgaattacattgatctatctgatgaatacagtattgtcgagctgctggctacgcgcaagcttgattcaaaatcgattattgacctgaatgtaagagcaaagtacggctgcacgatcctggccatcaaacatcatggagatatctgtctttcccccgcgcctgaagacatcattcacgagcaagattgcctggtgatcatgggccacaaaaaggatattaaacgttttgaaaacgaagggatgtagacaaaggtgacacttcaaaaggataaagtgatcaaatgggttcggtttacaccgcctcaagtgcttgccattggttttttccttaccattatcatcggggctgtcctattaatgcttccgatttccactacgaagccattgtcatggatagatgctctttttactgcggcttccgctacaactgttacagggcttgctgttgtcgataccggtactcaatttacggtattcgggcaaacagttattatggggctgattcagattggcgggcttggatttatgacgtttgcggtcttgatcgtcatgatattaggaaaaaaaatcggattaaaagaacgaatgctcgtccaggaagccttaaaccagccgacaatcggcggtgtcattggccttgtcaaagtcctgtttctgttttcgatcagtattgaattgatagcagcactcattttatccatccggcttgtacctcagtacggctggtcatccggcttgtttgcaagtttgtttcacgcaatatctgcttttaacaatgccgggttttcgttgtggcctgataatttgatgagctacgttggcgatcctacagtaaacctcgtgattactttcttatttattacaggagggatcggatttacggttctgtttgatgtgatgaaaaatcggcgttttaaagctttttctttacatacaaagctcatgcttacaggaacgctgatgttgaatgcgattgctatgcttacggtctttattttagaatacagcaaccccggcacgctcggccacctgcatatagtcgataaactgtgggcgtcctattttcaggcagtgacgccgagaaccgcaggcttcaattctctagattttggaagcatgagagaaggaacaattgtatttactttattattgatgtttatcggagcaggaagcgcatcaacggcgagcggcattaagctgactacgttcatcgtgattttaacatctgttattgcttacttgagaggtaaaaaagaaacggttattttccgccgttccatcaaatatccgattatcattaaagctttagctgtgagcgtcaccagtttgttcatcgtgtttttagggattttcgccctgacgatcacagaacaagcgccatttcttcaaattgtgtttgaaaccttttccgcattcggaactgtcggccttacgatggggcttactcctgaactgacaacagctggcaagtgtatcattattgtcatcatgtttatcggaagaattggtcctttaacgttcgtgttttcattcgcaaaaacagagcaatcaaatatccgttaccctgatggcgaagtgtttacagggtgatatcaaaaaaatccggcgtgcagtcgccggatttttttatgattcgatatgagattgattttgtcttttttcctgttccgcgatgatttcattatcctccgcgttatcacgggttactttttgtgtaagaatcgcaccaactgctacaagtatcataacagcgatgtaataacctttttcattgagttccaggttatcagcattatagagtccgatactaaacaaaaatactcccgcaaaaaaagtaaaataagctaatactgtaaaggcaaccgtgtttctgcgtctatatttctgcacctttgttccctcccgaaagcatagttaaaaagtgataacttccgtggaatattatacctcaaattccccgtaatggaacaaagaattaaaaataccagtaaaaagggcttaggttgcctcctttatttcaacagctgaatcatcaatccagccgataagtttatcattgatttggaattggtaccatacagactggcctttctgttttttagacacaacctttatgtctttgccgacgtaagattgggcagaggtaagccttatggaccgatcatcagtagagggcttggaccatacgtcttgaacggcactgtctttaatagaggcgtttaaatccacagatttgagggatggatttacctcatcgtactcatctaaatcgtatttttccacaatagcgctgattttgtcagcgtagtcagggtctgtagcatatcctgatgtttgcagggcggttgccgcttccttataattccctgcctcaagcaccggtttatacttctttttattccacgatgtgccacgaacgaacaattgggcgtgatcatccatagattcaaaaaacgtgctgtattttcgaaacttcgcgcgaatggtttttcttttccctttttcaacttcgtccgtttccatcgtgacatgatggcctttataattcccttttacgccaaaaaggttgttggccttagcagccagttcactgttcccccagtccgattcgagaatggcctgagcaattgtgatgctggggagaacatggtatttttcatacaaaatttgggcatgtccggacagactgtctataaatacttgctgttcatcgatttcttcagtttctttggatatttcaatcggttttgataaagttgtcgctaaaacaaacagagctagcggaatcgatacaaggaaaaatagtgaaatcaagagtttacgttttttaagttttttacgggccatgaaaaccttccttcgaattaaaagattacgaatgtaaaagaatctaccttttagaattttacttgcacttctaatatttttcaattctttagggataaagttgggaaaagattgcaaaataaaaaccttttcgctcaatgaaaaggtttttaccatgtttctatttttgtaaatttctgagtgcattacgatattccgtatcatttattactttatatgatttgacagttgccttcgacaaaccttctgctgaaacggccggtttttccggagctgttttcgctttatcatgtggtttatgtgccagcttgtgccccattccagtggcattcatacaaaatgacaggcagacgagcagcacgctaaggataaaagaaatgaagaagagatcatgataagcagtcatcatagaatcctgttccgaaccgctttgtctggcagcatcttttttcgtgaaaaagccgatgagaatgggaactcccatatagacaaacaatcttaaaaactgaacagctgtcattctcttgaccaaatcaggcagcgggcctcccatggcagctcccatcagccctgcggcgactgtcaggcctgttcccgctgcaagcatgataaacagtgccgcgaacatataaagagatgatcgatcctgtatatgcagccattgaaaattcacaaaaacgagaatgagtccgccgataataccgagcatccctggtccgactttatcatataacagagcgcttaaaatggccgcgatcgccactccgattaaaagagtcaagtttaaaaaaatgagatgctcctgagaaatatcatacatttgacggagcaagccttgaaaagcagacaggctgacagctaccgttatcgtccctgcagctatgatcaataagccaagcaccggttttggcagcagcatcagtttaatagatatgaaggggtttttcactttatattccacaatcaatagaccaatgagcaaacataacgtcaccccgaaaccaatccatacataacccgatgacagcccccatttttgcagaaaaatgaatgaaaccgctgaggctgcggcaaggaagacagataaaagaattcccgcacgatcaagcggctgttcttgatccgccgctccgtgatgctcatcatgaagaaagaaatagctcaccgcgacaccgatcagggacaaggtgccaaagatgataaacagccatctccaatgcccgcagcttgttgcaatggttcccaggattgtaccgatgataacagaaccatagaatcccccgatcagcacaagcagtgcatagttcctgcgttcaatcgggaatgacagtacaagcattggaatcataatcatcagcatgacgcctgttgccgccccctgtaaaaagcgccctgccgccatccatgcaatatcgcctgaacatgcgatgagcagtgagcctagtataaagacaggtaatgaagccagatagacgggacgcgcaccgaattttttcctcagcagcggtcctgccggaactaacaaggcaaaggccatattgccgatcaatatcgggtttactaatgtgaagacacttgttccaaccgctttctgaacaaggccttgaactgacgacaatgccgtgttagacatcaatcccggcccgaccgctaagacggcgagcaaagaaatcacccaatagtgttttgtcttcatgttgtcattccttcctatatgaatacatgcgaaacacatcattttttgaaaacaaaagaagctaatagattttgcataccattagctttcattctaatattctccctttcaggggaaatgatattattttattataattatgtgaatgaatgagcatataatcaaatattatttcaaatcgattgtgttttgtcaatggagtaaatttcaagcacaacatagaaagcttgaaagcttttccccgatattgtgtctagaactgcacttatgaatccctgctcgttccctcaagcgaattaaagcaggccgttttaatcctttcaatccactattcccactaataaactcgaataagttggtgataagacaacattttgcccccacatttttttgtgttcactgggcgtttgccgcctctaaattgtatatgggtaaataccatgaattaacctatgaaataccaatgtaaggaaattctaaatattccgggaggcaaaaacgaatggaactgtatgagtgtatccaagacatttttagcggcttgaaaaatccatcggttaaagatttagcaacgtctttaaaaaaaattccaaacgcagcaaaattaagtcaaccgtatattaaggaaccagaccagtacgcttacggccgaaatgccatctatcgaaataatgaattggaaattatcgtgattaacattccgccaaacaaggagacaacagtccacgatcatggtcaatccattggttgtgcaatggtgttagaaggaaagcttcttaattctatttatcgctcagccggcgaacacgcagaactctccaattcatactttgtccacgaaggagaatgccttatttcaaccaaaggtttaattcacaaaatgtctaatcccacatccgaacgaatggtgtctcttcatgtctactcccctcctttggaagacatgacggtctttgaggaacaaaaggaggtattggaaaattcatgattgacagataaactgctcactttgacttcgctcaactggaggattcagagaatgaatcttttcctcaaaacaaaaaaacccttatagaataagggtttacaggtatggagccaagggggctcgaacccctgacctctacgctgccagcgtagcgctctcccagctgagctatggccccgtatgtaatgtcatgtttattatagatgattttattttgaaaaacaagctgtttcctcttgaattgacagaaaaaataaggctcgtaaaagagccttattttcgacttacatcatgatcaaaagtaaaatcacaccgagaataattcgatagattgcaaatgggacaagtttgattttgttaatcagccttaagaagaaacggacgacaaacagtgcgacaacaaaggcacagataaagccgacgatgaaaaatggcatcagatccgagcttaagctgtcccaatgcttcacgaggcttagaaagctggctcccatcatgatcggcatcgccataataaacgtaaagtcggctgcagctcggtggtttaatccgagaataacaccgccggaaatggttgaacccgaacgcgagaaacccggccaaagggcaagacattggaataagccgacggctatcgcctgtttataggaaatgcggtcgagtgtgtctgtcgctgttttccgtttattgacccagtcagcaaaaagcatgaggattgccccggcaattaaaccgatggccacagttttaacggaaaataaatattcatcaatgtaatcttcaaacaaaaagccgagaacagctgcaggcacgagtccgacggcaatttgggcaatgcttaatttatgtccctgctcctggtcgcttgtaatattttttttcaagcccagtaagtttaaaattcggtctttaaacacgatagctactgctaaaatggagcctagctgaataaccaccttgaatgagttagcagcttcttctgacatcagattacttgatttaagccagatgtcgtctactataatcatatgtcctgtcgaagaaaccggcgcgtactctgttaatccttctacgattcctaaaatggcggctacaaacaattcccatagagtcatgattttgattctccccattagacatttatttttttacataacgggagcttcccataaatggaaagcccgtcttatataactataaacgaaaatcacactttatgccccggcgtattttcatttttttcttcatcgtataaatgtgaccgcattttaaaccagtcaaataaatgtgtcgtaatgactttggcaaccgcatagccgggaatcgcaagaatgattccaacaacgccgaacagcttgccggctgttaacagcagaaaaataatcgtaatcggatggatgtgaaggttttttcccataatttgcggagagatcagcttcccttcaatcagctgaacaatcgtccaaacgatcaccagcttaagcagcatgagcggcgatgtcactatggcaatgataatcgcaggcgtaatggcaatcgttggccctaaatatggaacgatgcttgtgcaagccgcaatgactgcaagcaatgaagcataatccagcccgataatcaaataaccgataaacagcaaaaacccgatacagaagctgacaatgatctggcctctgatataagagcttaaccgatgattcatttcgcttaagactgtgtatgtctgttctttcaattgcgtcggaacaaacttcagtatgtagaccggcaatttttttccgtcctttaacaaatagaaaaggataaacggaaccgtaacgattgaaatgataatctcagtcagggcgccgataaaattcccaacgccggtaaaggtactgttcacaattgtcgctgcctgatctgaaacctttgttgcgagatcagatatattgatgttcgtcgtttgctgggcctgattgacgaagttgctgccgatcagctgtttcgtctgattttcaacgatatccacatatcttgggatgttgtcgattaaactcataatttgttcttttaagaagggaatgatcgacacgattgtgatcgtgatcagcccgataaccaatagatatagcagcaatatagaatagattcttcttattcttcttctctcaaggaaatcgacgaccgggtttaacagataaaaaacaatgcctgtcaaaataatcggaagtgatatcgttttgagcaaaacaataatcggggtgaaaataaatgatgtttttgtaaatactagaatatttaaaccaatcagcagcagcacaagcaaaaataaaacaaacttattatccaagaagaatcgcttgaatctgccgctccatgtttgcaacgtctccactatcgttcctccgtcatacatagtttaattaaattgtacactatcgtccctataatgaaaaataaaaaccgttaattgctggaaaagctttcacggttttaacattctatttatatctatcatgtgattttgttctttttaagctataatttagctatatcatgcaaaaggagcgatacgagtgatacgttttgcaataataggaaccaactggattacagaccgctttcttgagtcagcagcggatatcgaagattttcagctgactgctgtttattcaagatcggctgaacgcgctggcgagtttgctgctaaacacaacgctgcgcatgccttctcagaccttcaggaaatggcggcgagcgattgctttgatgccgtatacatagcgagcccgaacgctcttcacaaggaacaagccgttctctttatgaaccatggcaagcatgtgctttgtgagaagccgtttgcttcgaatacaaaagaaacagaagagatgatctcagcggctaaggcaaacggcgttgttctcatggaagcaatgaagaccactttcctgccgaatttcaaagagctgaaaaaacacctgcataaaatcggcactgtccgcagatttaccgcaagctactgccagtattcctcacggtatgacgcgttcagaagcggaactgttttgaatgcgtttcagcctgagctttccaatgggtcattaatggatattggcgtctattgtatttatccggctgttgtgttgtttggcgcgccgaaggatgtaaaagcaaacggatatgctttatcctccggagtggacggagaaggaactgtcattctgtcttacgacgggttcgaagctgttctgatgcattccaaaatctctacttcctatgccccggctgaaatccagggtgaagacgggacgattgtaatcgatacgattcaccggcctgaacgtgttgaaatccgctaccgggacggccgccttgaaaacatcgcgatccctgatcctaaaccagcgatgttctatgaagcagaagaatttgtcacgctcataaaagagaataagctggaatctgaagaaaatacatttgaacggtctttgaccactgcaaagattatggaagaagcaagaaagcaaatggggattgtataccctgctgatcaagcttaaaaaaatccgcccgcgtgcaaatgccgcggcggattttttattaggcaatcggagaagatgccttcctttttaaaagcacctgttgctcatattctttgatgtcatgaagccatgcctcttttaccggaacgcccatttgctcacagtaggaatcccagatggctccgaaaggatatgttttgaattcctccatcagggccagcctttctgtatagcggccctcttcctgcaattgttttaaatatccgttcgggagaagcagggcatacaataaagctttgatcatatttctcgttccgatggtccaggcggctacacggttaatgctggcatcgaaaaaatccagaccgatggcgaccttctcaagagcatgatttcgtacaatttcaagagcgatttctctcaattcatcatccaaaaccactacatggtcgctatcccaacgaacaggccgcgatacgtgcaaggcaagcttgtctgtgtaaagcagcatggacgagatcttgtttgataccgtctcagtcggatggaaatggcctgtatcaagtaaacaaagcttatgattcgtcaaagcataagctaaataaaattcatgagatccgacaacatatgattcggagccaagcccgaacagcttgctctcgattgcatcaagattgtgttgttcactgatctcctctgcgaagatccgatccagtgattcttttagtcttttacgcggtgtcagcctatcactcgggatatccttatagccgtcgggaatccaaatattcgtcaagcaaggtgttcctaattctttcccgaagtattccccgatacggcggcaagcgatgcaatgcctgatccaaaattctctgatatccggatcagggtgtgaaagggtgagtccgtcagccgctttctcatgcgaaaacaaggttggattaaaatctaaaccgagaccaaggttttttgcccatttcacccagttttcaaaatgctgcggcttcaattcgtcacgttctaccgcttccctgtttgtttctgcgtatatcgcatgcaggtttacgcggtgctttccaggaatgagagaaagagccttctccaaatctcttcttaattcttcaggagtttgcgcttttccgggataattgccagtcacgtcaattccgcctgaaagctcgcccttatttacttcaaagccttcaatgtcgtcaccctgccagcaatggatcgaaatgggcacttgctctaattgccgaagcgcctcttcaacatcaattccccatttttcatatgcctgttttgcactgtcataattggcttttatggtcatacggctctctccctttatcagttttttaatccaaataaaaaacttcctttagatctatcgaaacaggactgaaatccgaatttgttttcattaatggcgccatcgatttccaccatcttcggcaaacttccgtgtccgccatctttctccatttctcttcatcctctatttctaaatatgcaaaaagcctgcctgtttcctcgtctagaaaaatggaataatggtgtgctccatgagctttgagtgcttctgccatctcaggccaaatgtcatcatgccgctgtttgtattcttcgtacttgtcttgatggacaaacatgatactggcttttcttttcaaaccttttcacctcttcatcatttagatagcgctttcaaaacagtttgctgaaatgactgaatgatcgtgcttctgtcaatgtctttaggtgtaaacactttgatcggaaaggaatttctgacgacttgccgggcttcttttatgtctttgacttctttggcagcaatcatttgcatcaaaagatttccggtggcagttgcctctatcggccctgcatataccgcttttccactcatgtctgccgttaattgatttaagaaatcattccgggctccgccgccgatgatatgaaattgctcgatcggtttttctgtgattgtttcgagctctttgatggctatcgcatagatgatggctaaattgctgtagatgcagcaggcaagttcgcctgcagtgcgaggagtcttttggcgggtttgtctgcaataatgttgtatttcctttatcatgttttctggattcaggaaacgtttatcatttaagtttataaattgctggaatggttctgtttttttggcttcttctgcaagctgctggaaagagtaatctgcttgtaactgttgtctgacttcttgtatcacccacatgccgataatgtttttgagaaagcgaatggtgttgtttgcgccgcgttcatttgtatagttgttttctaaagcaagatcagttattatcggtgttttgttttcaaccccgattaacgaccatgttccgctgctgatatacgcccagccatcatttattcctggcgctgcaatgacggccgaggccgtatcatgtgttgcgactgtcatcaccttgcacgccgggagatcataatccgggaaccactcatttcttagcttcccgagttcacaccccggttcagtcagcggggcaaattgctgttcctgaacggacacggcttcaagcaattcaggatcaagatttcccgttgaggcttttaaaagctgtgttgtggacgcatttgtgatttccgttacagcttttccggttaaacaatagcctaaataatcaggaatcatcataattttgtctgtctttatcagcagctcacggtcttcctcatacaattgatagatcgtgttgaaaggctgaaattgtattcctgttttttgataaattgcggcttttgagagggtatgttccagtttgtctattgtgtgatctgttcttctatcacggtaggagattgcttcccgcaaccgatcgcctttttcgtccagtaagacataatcaactgcccatgtatcaatgcctacggtgcagtgttcatacccaagcgtctttactttttgcagtccttgcaggatttgttttagcaaatgatcaatatcccaaaagcaatgcccgtctctttgactgaaaccgttagcgaacctgtgaatctcttgtatgtcaagcttcccttcattcagttcacctaccatgattctcccgcttgatgcgcctatatcaatggcagtataaatcatcctttcaccctctcttcgaaagaggaacagctgtcaccttcacctttttgtcctcaagagcttttaccgatgccggatcaagtccagaatccgtaataaggcggctgacatcttgcagcgaggcaatatgtgaaaactcgcggttcccccatttgcttgaatcggccatcaaaatggtctggtccgacctttcgatcatccgttttttgagcagcgcctgccactcatttgaatcactcatcccgttgtgtacgtcaaatcccttacatgacagaaaggttttattgacatgataggtctcaagtgaacgctctgctaacggaccggcaaatgataatgatttttccagcaaaatgccgcctgttgaaatgactgatatgttttctttattgctgagttcaatagctgctttcattgagtttgtaatcacggtgagctcaatgtcagggagtatttttgccatgtaccaagcggttgtgcttgcatcgagaatgattcggtctccgctttttacatatttggccgcttcgtgagcgatggcttttttttcgatgacattcgtgatttcccgttcagaaaaatgaatttctgattccttctgctgaatactgaccgctcctccgtggctccggctcagtttatgttctttttcaagcttttcaagatcacgccgaatggtttcctctgtgactgaaaatatgtcacttaattcggaaacgcggatgcttgaacgcatatttactatttccactattttttgctgccgttctgctactagcatcggtaacgcccttcctcatatcgtagtccgtcttatattttttatcatagcatatttctaacgcgtaaaagcagcagggacgccgccgtctaccgtgatcatgcagcccgttgttttttcggctttggaagaagcgaagaatgcaatggcttcggcaatatcctccgggtaaatattgacgagcaatgctgtccgtttccggtaatgttcctccagctgatccggttcaatcccgtacgccgcggctcgttcctcccgccagcttgaaccccagattgccgatccttgaagaaccgcatcaggcaaaacagagttgaccctaatgccgaattctccaccttctgcagcaatgcatcttgctaaatgggtttcaagcgccttaaccgagctgtaggcagaggcgtttttgcccgcataaaccgaatttttcgatccgacaaataccatgcttccgcctctattttggtgtttcatctgtttaaacgcttcacgggctacaaggaaatagcctgttcctaaaacattcatattaagattccattcttttagacttgtttcgtcaaatgggcttgatgtggccagcccggcattattgacgacgatatcaatgccgccgtaagcaagcgccgctcgttcaaaagctgattgtacgtcttcctcctttgtcacatccattttgacagccattgcccgtccttctccgtatgcatcgtttatttccccggcaattttctgtgcaccttctatattcagatcagctacgatcacgtgccctccctcagctgcaaatcggcggcatgctgcactgccgattccgccggctcctccagttatcaacgctacttttcgggaaaattctgcttccggcggggccagcgtgagtttatatagttcgagcggccaatattcgacatggtaggattcattttcatgtaaagaaacaaattgccccagagcggttgctcctttcatcacggcgatggccctccgatataaagccccgcttactttagacatggcataactttttcctgtattcaccattccgattcccggaatcaatatcacccgtggggaggattcaaagatttgatccccatcctgctgatttcgtgtaaagtaagcctgatactctgatgtaaaggtctcgactcctgacttgatcagatctgcaagcttgtgcacatcttgagtttccggattccaatcaatgtacagcggaacccgttttgtgtgaacaaggtgatccgggcatgccgcaccgatttgcgaaagtgctggcgcttggacactgtttacaaattccaagacatcgtcatgatcatcataggaaaggatcattttcttttcttcacttactgctcctctgatcacaggcatgatgcctgccaagatttgttttcttttatcctccggcagcggctgataccttttgcctccgaatacctcatgctgattgatacgatcgttaacatactgctcggcttcttgaatgatggatatcgttttttgataacatgtttcagacgtctctccccaagtgactaagccgtgtttctccattaatataagctcggcgtggggattgtttgctacgccttcagcgatcattttagacaaagtaaatccaggacggacgtatggcacccatacaaaccgatttccgtaaatgtcttcagcgatttgttttccattatccgcacagcatatgctgataatcgcatctggatgggtatggtcaacatgtttgtatggcagaaaagcgtgtaatagcgtttcaattgaagggcggggatgtttgctgtctatcatacaatgagacaggtagtctaccatttcttcatctggcatttggtcccttttaatcagcgggcggatatcatctaatttcaaaccggtaaagttatgcgctttcattgttgccaaatccgaaccgcttccttttacccacatgacttctatttcacggcctctaaaatccttttccgttgttttcatagatgtattccccccgccccagttgcagacagtgcggtctgacccgatcagattggacctgtacaccaattcctctacacctttaggcagccgtgcagctcgctctgaatcccatatatgtttcgccatatttgatattcctccatccccttttatttgtatccgttttcattatatatgatttctgtttgtttttgaattgtttttgtttatttttgcttttaacaaaaaagaaagcagcagatatgccgctttcttgtttcattatgattctattttaaatttcttcgtaatgtcctgaagttcttccgccatgtttgccaacgtttccgctgaagagctgatttcttccatggacgcaagctgttcttccgccgaagctgcgatatcctgaatgcctgctgagctttctttcgccactgcagaaatatcttcaacagcacttgacacttcctgtgatccggctgacagttgttcaaccgtcgcgttcaagttttgcaattcgccggaaatttgggttgtcatctcatagatttgtttaaagctttccgctgtttgatccgtaatctgcaagccttctttcacttcatgattcacggattggaacattgaaagtgaggtgctgatttccctgacaatctcttgaattaatccttcaatttccttggcggagtctgctgattgtacagcaagttttctaacctcttccgcaactactgagaaacctcttccgtattctcccgctcttgccgcctcaatcgcagcatttaatgcaagcaggttggtttgatcagcaatgccattaatcacattcaagatgcttgtgatatcttgcgattttgtttcaaggcccttcacaaccgcttccgctttttgaacggattggtcaattgttttcatctggccgactgtatgctccaccagcttttctccgctgcccgctgcctcagaggactgaatcgatgatttcgtaatggttgaagaggcctgagccacttttgaaatcccctcgttcatttgagaaagatgatttgagcttgtttccagtttctcgctttgtgcctcgttgccatctgagaattgttcgatggcaagtgtaatatgttcagttgccttgctcgtttgggctgcgcttgccgtcagctcctcagaagatgaagcaacgttttctacagacgtttgaataacgccgattacagaacgcaatgatgcagacatttcattaaagctttcgccaagctggccaaactcgtttttcgagtgaatgtcaatgacttctgtgagatctccactgctgatttttgcagacgttgagacaagttttcttaacggcttggtgatggcacggataatatagagaatgagtatgccgccgattacaattgacacgcatagaatgataaccgcagtgttcagcaccggacttgaagcatcttgcaattcactgacaaaatatgtgcctgcgattttccagccagtcagtttatttgtcgtaaaggccattttcttttctttgccttcgaatatatattcaaatgagccttcttttttggaatatacttggtttgtccaatcgccggatccggttgtccccggcttaattgtcggatgggcgatatattttttgttgccagtcgtaataaatgcaaagccttctttaccgattttgattctttgtgatgcagtaagcacttcatccaggtttaaatcaagcgctataacccctgaaccgtcttttaattgttttgaaattgtgacaacgatatctcctgtcgcttcatcagtatacggttctgagaaaacagcttgtcctttttccgcaaccgcctgtttgtaccagtcacgtcctgtcggatcgaaacctttcggaacaccgctatccggatatttataaagcttcttatcttctgaagcagcatagattgcgcctacatcgtcgttaagtgtcgtgtactgcttaaatttctctttcagtaatgttttgtttttgcctaacaatatgtctttatcgactgtctcactataataatctattgcttttactttatcttctaatttattttgcagcgtactgtttagttcttcaacatttcccttcgcactgtttatgagctctctgtctaacgcgttccaagctgattgataactgaaatatgctaaaaccccaaccggcaaaataagcactgccagaaacgcagcgattagcggtttgctgatcgatggctgtttgatccaatgtatgaattttcccattcttgttgactcctcctttaagataaatctaatatcgtcaaactaggataaaaggtttaataaaaaaactaaaaaaaacacccaagcgtaacaagcttgggtgttaaggcttattattcgattttgaatcgtttggtcatatcgcgaagctcttccgccatagacgaaagggtctctgcagacgagctgatttcttccatggaagcaagctgctcttcggctgacgccgcgatatcttgtatatgcgctgaactttcttttgaaatcgatgcaatgtgctcagacgctcccgaaacttcttcggagctggcagaaagctgctgaaccgtcgcactcatattttgcagttcgccggcgatttggttcgtcatttcagaaatgcgtttgaagctcatttctgttttatctgtgatgtcaagtcctgtctgcacctcttgattgacagattggaacatgccgagtgatgtattgatttccttcacaatttcgatgattaatccttcaatctcttttgctgaatctgctgactgtactgccagttttcttacttcttccgctacaacggagaagccgcggccgtactcgcctgcgcgcgctgcttcaattgctgcgtttaaggcaagcaggttcgtctggtctgcgatgccattgatcacacgcaaaatgtttgtaatatctttcgatttcgtttccaatccgcgtacgacttgctccgcttctttaacggacttgtcaatgacattcatttggccgacggtttgatgaacaagcttgccgccttcacttgcaatttctgtcgattgaacagatgaatcagtgatcacttcagaagcttgagccatattcgtcaacccgtcattcatttgataaatgtgctctgctgccgtttcaatgttttcgttttgtttttcattgccgttagaaaattgttcaatcgccaatgtaatgtgctctgttgccttgctcgtttgcgcagctgatgcagtgagctcctcagaggaagcggcaacattatctacggaatcctggatggcgtgtatgagagaacgaagtgacgacgccatattgttaaagcttttgccaagctcgcccaattcatcttttgaacggatatcaatggtttccgtcaaatctccctcgctgatccgcttagaggaaccgacaagctgtttcagcggtgttgtaatcgaccgaatgatcaaagtcatgacgataatccctatgataatagctgcggccaagacaattaaagcaaggtgtaggacaggctgggctgcctcatggatttcatccaaatacatggtgccgccgatcttccatcccgtcaacttgtttgtgtcaaaggccatttttttcttatcgccatccatggtgtattgaaaatcgcctttatcagcactcaacatcttatcgagccagtcgccttttaattcagttcctgatttttcattaggatgagcgacaacttttttgtccttcgtcatgataaatgcgtagccttgtgtgccgatgttgacttttttggttgttttcagcagattttcaatggtcatgttgattgcgataacgcctgaaccatcttttgtctgctgggcgattgtcacaaccatcgtatttgtcgacgcggttttataagggtctgtgatcacgactttccctttatttgcaaccgcttttttgtaccagtcgcgttcaaccggattgtagccgcttggcatcggaagatccggatagcgggtaaagtgcccttttgtgtcacttgtataaatggattctacatccttgttaatgctgatatattgtgagaatttctctgcaatgcttgcattgctttttgcattgtatttctcttttgtcagccattcgctgaaataatcagcactgttttctttttcgccgatgctggtgttaatgatttcgtttaattgctgtacattttccaatgcgctccccatcatctgtctgtcgagtgagctgctagccgattgataggcaaagatcgccaatataacaaccggtatgatgaggatcgacagaaaggaaacaagaagcttccgtgtaattgatctttgttttatgagttggagtatttttttcatcattcatttctccttttttatgctacccttcatatcggctggaaatgggtaaatatatacagcaaaaaagaagaaatttaacaaaagtaactaatttcccataaataaatagtattttagacctattatttatctactttaaattgttttgtcagatcacggagttcttcagacattctttcaagcgtcagtgcagatgaactaatctcctccatggatgccagctgttcctcagctgaagcggcgatatcttggatgccatccgagctttccttagaaatggcagtgatatcatttgaagctgcggaaatttcttgagctcccgatgacagctcctcaaccgtcgcattcatgttttgcagctcggaagcaatttgattggtcatttgcgatatatgtttgaagctctgtttagtttcatccgtcatgacaagccctgtttcaacttctttgtttacggactgaagcacgttcagtgatgtgtgaatttcttttactatttcactgatcagcgattcaatttcttttgctgagtcagccgactgtaccgcgagctttctcacttcctcagcgacgactgaaaagccccggccatattcacccgctctggccgcttcaatggcggcatttaaagccaaaagattggtttgatccgcaatgccgttgatgacacgcaaaatattcgtgatatcctttgatttgatctccagccctttcaccacttgttccgctgattttacagaatggtcaattgtgttcatttggccggctgttttctggacgagtgtctcccctttacttgacacttctgttgaatctgcggatgtttctgtaatcactgctgcagcccgcgccagctctgccaatccgtcattcatttcattaatttgttcggttgtcgtttctattttctcgctttggctttcactgccgtttgaaaattgctcgatagccatcgtaatgtgctcagtggctctgcttgtctggtctgccgatgcagtcagctcttcagacgatgaggcaacgtgttctactgagtctttgatcccgtgaatgagcgagcgaagcgagtgtgccatatgattgaagctctcgctcagaacgccgagttcatcttttgaattgatttcaatcgtttcggttagatcgccttcactaattttttcagcggatgcgacaatgcgtctcaatggctttgtgatggatcgaatcacaaaataaatcgccgtcattccagctgcgatggcaatcgccagaacgattgaagccatgatcagaaccctgcttgcagcatcgtgaatctcgtttgcatacatcgtgccgctgattttccagcctgttgtttcgcttgttgcaaatgccatttttttctttttgcctttgtacgtatattcaaagtccccgcttttatccttgtagagcttatcaacccagtccccttttagctctgttcccgctttttctccggagtaggcgatgactttcttgttttggctcaaaataaaagcatagccttcttttccgatattgattcctttcgcggtagtgactaagtcatcaattttcatatcaatggcgacaacacctgacccatccaccgtttgacgggcgatggtgacgaccatttttcctgatgaaatcgattcataaggctcagtgacaattgttttgcctttattggccattgcttctttgtaccaatctcgttccaaagcattaaagtcacttggcatgtcagcgtacggataacgggtgaattccccgtctttgccgcttgaaaataccgcagcgacattatcattcatttggataaattgtttaaattcctgtttcagctctgttttctttttatcctgaaatttttcttctgtagcccaatcgctgaaatatgcgaggcttttttcagtcgtgctgattttatcatcaatgatgtgatctaatatctgaacattttcctttgcgctttgcgtcatctgtacatcaagtgaggcaactgctgattgataagcgctaaccgaaagggcggttatcggaacaattaagatcagcaggaaagaaataataagtctccttgcaattgatgatctgcgaatagtggtgagtgtttttttcatttccttttgaaccttctttcaataatttacaaattatatcggcggatcttcctttaaattacattgaaaatggaggaaaaaatgaaaaatagttctaaattcacctgttaaactaggactttattattgtttaccatataaaaaacagcgctttgatagcgctgtttttcggcttttactcgattttaaattgtttcgtcagatcacgaagctcttctgccatctgcgcaagagtggtcgctgaggaactgatttcttccatggaagcaagctgttcttcagctgatgcggcaatgtcctggatgcttgccgagctttctttcgacacgtctgcaatgccgctgactgctgctgaaacatgctgtgaacgatctgacagctgctcgacggtggaattcatcgtctgcagcttgcccgcgatttcgtttgtcatgctgaaaatgctctggaagctttcttttgtattgtctgtgacaacaagtccggactgtacttcctgattgacctctttaaacatgtgaagagaggtttcgatttctgcgacgatttcttggatcagcttttcgatttcttttgctgaatcggctgattggacagccagcttgcgcacttcctccgctacgacagagaagccgcgtccagactctccggcacgcgccgcttcaatggctgcatttagtgcaagcagatttgtttggtcagcgattccgttgatgactctcaaaatgcttgtgatgtcttttgattttccttctaagcctttgacaacagcttcagcctgctgaacagattgattaatcgagttcatttgtccgactgtctgctgcacaaacttctcacccgttccggcgatttccgttgattggatagatgcctttgtaatatctgacgatgtttgtgagacttgctggagtccttcattcattaagttcagctgatgagagctggattcaaccttttcgctttgctcctcgtttccgtttgagaactgctcaatcgccatcgtaatatgctcggtggctttactcgtctgcccggcagatgcggtaagctgttcggaagatgcggccacattgttcaccgagtcctgaatagcactgatcagcgagcggagagattgtcccatttcattgaagctttccccaagctccccaagctcatcctttgaatggatttcgatcgtttcggtcagatcccccctgctgatcgttttcgatgattgaacaagatgttttaacggttttgtaatcgaacgaacgataaacagaattaaaattccgcccgccacaatggaagcaatcagcacaatcattcctgtagtcagcacagactttgaggcatccttaatttcatccatatacattgtgccggctattttccaaccagtcagttcgtttgtagtataggtcatctttttatcttcgttattaagagtatactggagttcaccgctgtcattcgcatacattttggctacccagtcgcctgaaagcttttctccagccttatggttcttgtgggcgacataggttttgttttttgttgcaatgaaagcataaccttcttttccgaccttgatttgtttcatttgttctaacaatttatcaatggtaatatccatggcgacaacgccagatccgtccttcagctcctgtgcaatggtaatgaccatgcttccgtcactcgcagccacgtaaggatctgtcacgacaatttcaccgccggccttcatcgcatcctggtaccaaggccgttgtctcgggtcgtatccttccggcaatttttcttttggcgcttgtacataagtgccgttatctgcgcccccataaattctggctactccttgattaatagatacatattgtgaaaatttagctttgatctcttcttgattcgatttccctttgaatgcggaccttttaagagattcactgaaaaaggtgactgctttcgctttttctcccagatcatttgtaacagttgtattaaatgtatcgacactgtttttcgcatttcccataatttcctgatccagctttccgctggcgcttcggtaagagctaaattctaatataagaatagggataatgagaatcgcaataaatgagacgattaatttctttgaaatagacggtttcttaagccaattgataaaagtcttcatgtccacttgctccttcaggtttgatacagtatatatcggctgcttaaaaaagttttaaaataaaaaatggaagaagttctttttggctgtcttctgtcgttttaactttcattgcccaagctctttgcatatcttataaaaaacaaggggggctaaacatgattattgtatcaggacaattgctccgtccccaggatattgaaaattggcagattgatcaaaatctgaatccgctgttaaaagagatgattgagacgcctgttcagtttgattatcattcaattgctgaactgatgtttgagcttaaactgcggatgaatattgtagcagcggcaaagacgctgcacaaaagcggggcgaagtttgccacttttttaaaaacatacgggaatacaacgtattggagggtttcaccggagggcgccttggagctgaaatacagaatgccgccttcaaaagcgattcgtgacattgctgagaacggcccgttttatgcgtttgaatgcgcaaccgcaatcgttatcatttattacttggccttaatcgatactatcggagaagataaattcaatgccagctttgacagaattattttatatgactggcattatgagaaattgccgctctatacggaaacaggacaccactttttccttggagattgtttgtattttaagaatcctgaatttgatccacaaaaggcgcaatggagaggcgaaaatgtgattttactgggggaagataaatattttgcccatggtcttggaatcttaaacggaaagcaaattattgataagctgaattcttttaggaaaaaaggagccttacagtcagcctaccttctgtctcaggcgaccagactggatgttccgtctcttttccgcatcgtccgctaaaaagccccatcgcctattttccggacgatggggtttcaaatgcctttcgttttcgatagaagggggctgtgccgaaatattggttcgcagcccactccattttttcaaggtcatttcttgtcacgattggatcctggctgctccatttgataaagcggacaaaatagtagcctttgataggaaccattgtaacttttgagtgaggccagccttcaaatacaaactcaattttccctctttttttataagagtattgaagaatgttcatatttgtcacctcagtttatcaagttacgttcggcaaagctcggtacgtttacatccattgattgactatccctcatgcatgctttcctgaaaacaaagggtgaggcgcgtgtctctttccctcgctttttatttcgcatatggacgaatgccaagcgcgccttcattcgataaagcggcagccggggcgggtgtgacaagccctccggctatcggcgtttgttcagcgatcatgcttttgtcaaaaaaacagcctattatcccatcattttgatatagcatgtccgggtgcgagggccgtcaaattcgcagaaataaatgccctgccaagttccaagaatgagccggccgttttccacaatgacatgctgtgaagctccgactgtactcgacttcatgtgtgcagctgtattgccctccatatggcggtccagctcatgttcccacggatatacctcatcaaaccttctgagcatatcttttttgacgtccggatcggcattttcattaattgtaatgcccgcagtcgtatgcggacagtaaatcagcgctgcgccgctcgttatacctgtttcttgaagaaacgcttccacctcccgggtgatatcaatcatttcatctcgtttggttgttttgatttgcagtgttttcagcatttgtttctcctttcgtttgtccgctctcatcgcttaattcgttctgtgttcttttttttcctgttaaaccgctctcataaacccgataaaacaaaaaaactccagtctaaggctggagtttagcaccatagatatattcttgcttcatacggctttaagagtactgatgtcatatgcttgtgcggctctgtttcaatatttgacaagacgagtgcatctgatgacaatggcaatccagagtgcctgaacaacgccggtgttcctgtcagattggccgcaatcagtgcagtatggctctcgtttttccgaagatatgcaaagatttgctgatcttccggtaaaatgagctcgtatgtcccgttaataaaaacatcatatgtttggcgcagcttgatcaagcttttgtaaaaatggtaaacggatgttttatcgtttttttgcgcctcggcattcagccatttgtaattctcattgattccgatccacggtttggcctcagaaaatccggcgtatggacctgcattccattgcatcggcgttcttgaattgtctcttccctttttccagacaatcttcatcacatcctcgtgtgatgtgcctttcgctgtttttgtttcatacaggcgtttcattgcgacatcatcatagtcctcaatagagggaaaagccacgttcgtcatcccgagttcctgtccctgataaataaacggtgtgcctttcatgagaaaataaacagcggaaagcgcttttgcactttctttcaggtacactccgtcgtctccccacacagaaactgaacggggctggtcgtgattctccataaacaaagcattccagccgatcccttccagactgtcctgccagtcagttaaaattcgtttaaatgcaacgatatcaatactttcattgatctctacatcccacaggccgagatgctcaaattgaaaaatcatgctgaatatgccgtttttttctccagcccaatcagctgcttcttttgcagcgacgccgtttgcttcaccaactgtcataatcggatagcgggaaaatgtgttttccttcagctctgttaacaaatccataatgccgtcagcattcatatgataaggaaaggaagggacatagtccaatccctttggattcggcatgtcgggaagcccttcttttttcttaatatgcgtaatggcatccacccgaaatccgtcaattcctttatcaagccaccaattgatcatgtcataaacggcattcctcacctgttcattttcccaattcaaatcaggctgttttttatcaaaaaggtgcagataatactggcttgtcttttgatcatactcccaagccggcccgccgaaaatgctttcccaattgttgggcgcttttccgtttttgccgtctttccaaatataccagtcgcgcttttccgagtgtatggatgaacgggattctatgaaccatggatgttcgtcgcttgtgtggttcacaacgagatccataatcagcttcatccccagatcatgaatgtcaccaagcagttcatcaaaatcttccatggtgccaaactcgcttaatatgttttgataatcccggatatcatagccattatcagcattcggtgagtcatacagcgggcaaatccatatgacgtcagcgcccagctcttttatgtaagaaagcttggatctgattccttgaatatccccgattccgtcgccatttgaatctttaaaactgcgggggtaaatttggtaaacaacggtttccttccaccaagcctttttcatacagccactcctttccagtgtaccggtcttatatatcctatgtagaaaaaaggcttcacagcattgctttttaagaaatgacttgatgacacaaaaaacagccgtttgttccccggctgttttttatcaaaaatcagttttttttatttctacaaaacggatgtggtgatcttcggcgtcgaggattttaaattcacagccctccgcgtgtatcacatcccctgctttcagctccattttttgcgttagaagccagcctgcaatcgtatcaatttcttcattttcaatcgcaatgtcgagaaggtcattcacttcgtctattagcgcttttccatccatcacataatggtgctcgccctttttcaggatgtgcggtgtttcatcctgatcatactcatcgcggatttccccgacgatttcctcgataatatcctctacagtgacaagccccgccgttcccccgtattcatcgacaagaatcgccatgtgaatccgctccttctgcatgcggattaaaagctgctgaacaggaatgctttcaatgaccctgataacgggcctcatgatttgctccagctttatcggctggccgagaaaataagctttaaacatatctttgctgttgatgatccctaaaatatgatccttgtcatctttgatgacagggtagcgtgtataccgttcattaatgatgtgatgaattgcctcttcaagcgactgctccagagagataaccgcaatttctgtccgcggaatcataatctctctcgctacccggttgtcaaattcaaaaatcttatttacataacggaattcagactgattaatttctcccttttcatagctttctgaaaggatcagtcttagttcctcctcgctgatgacaacctgatgctcctttactgaatgaaagccaaacaatttcacaagaaaacttgcagagccgtttaatgctttaataaacgggtacgtgattttataaaaccagatcagcggctttgcaatccataagcttacagcttcagctttttgaatagaaaccgttttcggagcaagctcccccatcaccacatgcaaaaaagtgacgatgataaatgcaactacaaatgtgacaatgtggttaaacggttccggcatgcctgtcattgtaaataagggatgaagaaaacgttcaaatgtaggttcaccaagccatccaaggccgagggcagtaatcgtaatcccgagctggcaggctgataaatactcgtcaagattggagatgattttatgtgcggctagcgctcggctgtcaccgctttcgatgagctgattgatttttgaacctctgattttgacgatcgcaaattccgctgcaacgaaaacagccgtaatgccaatcaaaacaaaaatggcgatcaattgtaaaataagcaaaaaaagcccttaccataaatggtaaggggccacctccttaacgttaattctcatcacgaccgtttaagaaaatcatcacaaaacgaagtagttcaaacagggaaaccagggcggcggccacatacgttaaggcagcagcgctcagcactttatttaccccattttcttcattgtttcggatgaatccttctgacacaataatctgcttggcgcgtgaacttgcattgaattcgacaggcaatgtaatcagctggaaaaagactgccgctgaaaacagtatgatgccaagcccgatcaaattcaggctgccgagaagcatgcctcctaagaaaagcaaaggagctacaccggatgcaaaattcacgactgggaagattttatgtctcagcacaagcgcaccatatgactcctgatgctgcaaggcatgtccgacttcatgggaagctacggatatggcggaaattgagcggccgtaatagaccggctcagataaacgcaccacccgtcttgtcgggtcgtaatggtctgttaaagtgcctcttaccggttcgaccggcacgtcgtaaagaccgtttatatctaaaatccgtcttgccgtttctgcccctgtacgtccgcttgaggcttccacttttgaatatttttcaaagttgctctttactttaaattgtgcccaaaacgacaatcccaatgcggctattgttaaaaatataaacagcattttttcatcatcctttttccatgatcatttctctattaagattattttaatgagttttctttcccgtgtacagaaatgcgctttttcttccggcttggagcacagaatccaatcagcaaaaagaacaggcctgctgaaaacaaataaaaggcgaaaccgccggccagttctttcagaaaataaaaccaggagaagctgccggaaaagtgattatatgaattcaaatcgaaaataaacaaaatcaccgcggatgccgccagctgtgtaccgatcaaaaccacgatcgttctttgaaagatcgtcatctttttcatcctttttgttttagtttatggagaaatccggttttatatgttttgtacattttttgaaaaacatcaccggaagtgggacatactgttagaaaaaagcacgggtgtgatggaagctatgaaagtgacgagtgaggaaaaggaacagctgagcacagcaatcgaccgaatgaatgaaggactggacgcgtttatccagctgtataatgaatcggaaattgatgaaccgcttattcagcttgatgatgatacagccgagttaatgaagcaggcccgagataagtacggccaggaaaagctaaatgaaaaattaaatacaattattaaacagattttatccatctcagtatctgaagaaggagaaaaagaatgaaatcaaatcggatatttatttcatggctcaggtggccgttatttatccgaatcggggttattattttatgtctgattcttttgttcggccaaatcatttatatacttgagcctaagcagttcacttcggtattcgaaggcatttggtgggctgtcgttacggtttcgacagtcggttatggagactatgtgccgcacacgccgctgggacaggcagccggaatactgctgattttgagcggagcaagctttgtcacagcatatttcgctacgttatcagcggccgcattcagcagacagcatcgctacatcgaaggaaaagttgcttacaaaggccgggaccacatcattctgatcgggtggaatgaaaaaacaaaccggcttttgaaggaccttcagcttgccgccccttccaaaacggtcgtactaatcgatgaatccttaacagaaggcccgcttattgaaaacgttcatttcatacgcgggcacgctgccgatgatgggacactgaaacgggccaatattactgaagcggaatcagtgatgattactgccgatcagtataaaagtgaaactgatgctgatatgctgtcagtgctgactcttttatctgttaaagggcttaatccccttgcttactgcatcgtcgagattttgactgaccgttttgtcaccaatgcggagcgggcaggtgcaaaccaaatcatcggaacttcagaatttatcagccgggcgatgctgcagcattaccaagtcaagttacggccgtctaaacagcagaacggaatcaagctgacacttgatcagcatgtggagcttcttgctgttcctgacgaactaaagggagcggcttacaaaacctgtgttctctatttccttgatcacaacacaacaattataggcgtacaaaaagaggaggggccgatgatttcccctcctcttacatacaaggtgctcgaaacagatcaattccttgccatctagtgtaacagaacatcctccaattctttcacgagagaggcgccgatatccaaaaatgccggatcaatttccgcgtcccgcctttccggttcggaaaattgattaaacagtgattggaaaggccctccctcggcgtgatcgtcaacatccgcctgaaacacctgtctcagcataaacggcgttccgatccggacggccgcccctcgttcatcgagactgccctgtaccgcattgacgggaattcttaaaaataaatagccgtctctatcatcaattttataatcaaagtagccatgatcgtattcccagccgccgtttatcacataaccgagcggcttcatcacttgttccagttcttgaagcagaaaagactgcccatctatcgcggaaggtattggtatcatcagaatgccccttttttcacttatcctgtcccgccgaacaagacttcattcagaggcgcctacatggaaatcgttgtttctttcgcgcggccaacagaaaagaaagcgcattcaattaagaagtaaacagtcattgccgctgcaagccatacagctgaatcccaagacacataaacaaccgttgcatagagtcctaatttagtgaaaagagtatgggttcgttttaaatgcaaaatccgatgtaccgcatcggtaaaaagggcaagcggcaaaccaatgagaagaaaggcgtggatgaaaaaatgtgaaagcgtgccgccaaagcttgaagaaaactctgtatacacggcatcaaaggagataaggaaacttaaaatagctgcagaaaaaccggcaatgatgagatgtttaaccaattgtttcatgaacatcagcacctttctgattttataaaaagccgaccggcaaatgccagtcagctttctcacattaatcttccagacgtttttcaagctctgcttttttctcttcaaagccaggtttgccgagtaacgcaaacatattgactttatacgcttctacaccaggctggtcaaacggattgacgccaaggaggtaaccgctcatcgcgcaggctttttcgaagaaatatacaaggtatccaaaagtatatgcattcagctcaggaatgttaacgattaagttcggaacatttccgtctgtatgggcaagcattgtgccttggaatgctttcttgttaacgaaatcaacagttttaccggctaaatagttcaagccgtcaagatcgttatccgcttcctcaattgtcagttcatgtttaggtttctctacgttcaggaccgtttcgaataaatctctgcggccttcttgtacatactggcctaaagaatgaaggtctgttgaatagttcgctgaagaaggataaatgcccttctcatctttcccttcgctttctccgaacagctgcttccaccattccgcaaagtattgaagcgccggttcgtagttgatgagcatttcaattgttttgcccttattataaaggacattgcgaacaaccgcatattggtatgctgggttatcttccagttcagatgttgcaaaatctttgctcgcatccagggcgcctttcatcatgtcatcaatgttgacgccgctgacagcaatcggcaagaggcctacagctgttaaaactgaataacggccgccgacatcgtcaggaataacaaatgattcgaaaccttcttcgttagaaagcgtttttaatgcgccgcgctctttatcagttgttgcataaatccgcgctttcgcttcttctttaccgtatttctcttcaagaagcttgcggaaaatacggaaagcgattgcaggttcagttgttgtacctgatttagaaatcacattaatagagaagtcaacatcttcaagaagatccatgacgtctctcatataagatgaactgatgttgttcccgataaaaatgacttgcggattgccgcgttttgcttttggcaaagtgttataaaacgcgtgattcagcgcttcaatcgctgcccgcgctccaagataagaaccgccgatgccgacaacaagcaagacatcagagtcagatttgattttttccgcgctttttttgatgcgcgcgaattcttctttatcataatgttcagggaggtccacccagcctagaaaatcgctgcccgcgcctgttttttcatggatattatggtgtgctgtttttacaaagtcccgcaggtatgtaagttcatgttcgttgaagaaagtcaacgcttttgagtagtcaaagcgtacatgcgtcattgcttgtccctccataacggtataatgttttcatctttcactttatatgaacttatctgtgaaatcaagtcaagaagaaagggcggaatgactggattccgccctttgggtttatagagacgcgcgaaggatggcaagcacgtcatctttgttcagtttttggaagttgccgaagcccccgtgttccatttccttggctgcgatatcagcaatcagttcaagcttttcttctccaatattgtaatcagcaagacgagaaggtgcaccgaggcttgtccagaacgcagacagtttatcgattccttcaagcgcaatttctttatctgttttgccttcagtatcaatgtcaaacatgttgagcattaggtttttaaaacggcctacatttgtatcaagcgtgtatctcatccagtttgggaacagtatcgccaaaccgcccgcgtgcggaatatcatatacagctgaaacagcgtgttccattgtatgagaagcccagtcaccaaagtagcccatttggagcgtgccgtttaaagcaatagtaccagcgtacaaaatcgtttcacgaagtttgtagttttccagatcttcaagaagcttaggagctgtttcgatgaccgtctgcaaaacagcaaagcacattctatcctgaagcggcgtgttttcaacattatggaaatattgttcgaatacgtggctcatcatgtcaaccatgccgtatactgtttgattttctggaacggtgaacgtattttcagggtctaaaatagagaaacgcggatgagtgacattgctgccccatacaaatttctcgtttgtttcccagtttgtaatcacggaatctgggttcatttcagaccctgttgcagcaagagttaaaacagtgccaaacggcagcgcatcctccgctgttacttttttgctgaaaatatcccaagcgtcgccatcgtatttgacgccagctgcgattgcctttgtacagtcaatcacactgcctccgccgacagcaagcagaaaatcaatgtcatgctctctgcaaagtcctatgcctttttccactgttgcaagacgcgggttcggctctacacctgacagctcatgaacaacagcgccctcttcttttaaaatgcctgtgacttgatcataaaggccgttgcgtttaatgctgccgcccccgtaaacaagcagtacattcttgccgtattgtttgaattcttttcttaattgatcaagctgaccttttccaaaaatcagctttgtcggattataataagtgaaattttccatagtaaaacctccaaatgatgctggtaaaaaacagattttccattgtaacataagttgacaaaaagaaaaagggaagcagccaaacggctatttcccctttttttatagagatgctttcaaaattgaaagcacatcttctttgttgagtgatttaaattggccgaatgtaccgttagccattgccttgtcagcaattgtgtcaagctgctcatcattaatatcataatcagcaagacggttcggagcgccaaggcttgtccagaatgcggacagcttatcgataccttcaagggcaatttcttcatccgttttacctgcttcttcaacatcaaacacgcgaactgcaagctgtttcatgcgggcagggttttcagacaatgtgtgtctcatccagttcgggaacaaaattgccagtccgccggcatgcggaatatcataaacggctgatactgcatgttcaatattatgagtagcccaatcccctcttgcccccatagaaagcatgccgtttaatgcgattgttcctgtgtacaggatcgtctcacgcaattcgtaattttcgagatcattgatcagcttaggcgctgtttcaatgactgtacgcagaagtgattcacacatgcggtcctgatacggcgtgtttgatacatgatggaagtattgttcgaatacgtggctcatcatgtcaaccatcccgtagatcgtgtggtttttaggtactgtgaatgtattcaccggatcaagaatcgaaaatttagggaatacgagcgggctgccccagccgtatttttcttttgtttcccagtttgtaataacagatcctgagttcatttctgaaccagtcgcagcgagagtcaataccgttccgaatggcaaagcatcttttggctgatgctttttcgtaacgatatcccacgcatcaccatcatactttgctcctgcggcaatcgcttttgtacagtcgattacgcttccgcctccgacagccagcaagaaatcaatgttttgttctttacagatggcaacacctttattaacagtcgacacacgaggattcggttccacacctgctaattcatgcacggtcgctccggctttattcagctgttcaatcacttgatcatacaggccgctgcgtttaatgctgccgcctccgtacacaagcaatacgttttttccgtaaggtttgagttcctccggaagtctttccacttcgccgcgcccgaaaattaatttggtcggattccagtatgtaaagttttgcatgacatctcctccttagattttttattatgcagaatgtcctcaccacatgtaaagcaatcagctctcaccgatcagcataccagatggttttattttgcaagatgctgggaaagaagctgatataagcgagggcaggccagcctcatatggagaatgcatgtatagattctccaatatgtcacaatctataactgttttaataattcatggaggaggttgcaaaacatgagtaccattcaaagaatttgtcttgtattaaccatcattggcgccattaactggggactgatcggatttttccaatttgacttagtagcggctatcttcggcggccaagggtcagctctttcccgaatcatttacggacttgtcggaatcgccggcttaatcaacctcggtctgctatttaagccaaacgaggaaagatcacgtgaagaagcagcaaatcctgaaatgcgataggatatcaatcacgctgaaataggattttgtattaaatcaaaagcaccgaacattcctgtccggtgctttttttcatgcttattttttgataaggtctttgcggttggacatttcgatccactcttcaagcttatcttttaatgtgttgaaaccttgtggtgtagaagcttcttcgcttacttgagcagctttaggttttcttggtttgctttcttttttctcaggcgcagcttgtgtcgcacgaattgaaaggctgattttgcctttttcttcatcaacagcaagtacttttacttgtacttcgtcgccaactgaaaggtgctcgttgatatcttttacgaaaccgtgagtcacttcagaaatgtgtactaaaccttgagtttcttcatctaatgcaacaaacgcaccatacgcttgtaatcctgtaactttaccagtgtaaacactgcccacttcaaattttgctgccattcataacaactcctaagttaaattaaatatctgtttatacgcaatttaaaattatatcacacatgtcttatttccgcaaagaaaactttttcataaaaaaatcaggtttatgcacagcaaaaagggggtaaactgaaaataccaaaggctttctagtattcccccttttattggatgcgaacaaaaggttcgtatctttttttatattgttttgtgcaggaagcgtttcattctgactaacgcttcttgaagctgttcaatcgaggttgcgtatgaacaacggatatatccctcaccgctcggaccaaacacacttccaggaacaacggccactttttcttgcgtcagaagctcctcggcaaactgttctgaactcatccccgtgcttttaattgatggaaaagcatagaaagcgccgcccggatgatgacagctgagaccgatttcattgagcgattctacaaacagattccgtcttcttcgatagctttttttcattttttctacgtcttccatgccgttcttcaggccttcaagggcggcaaactgcgccattgcgggcgcacacatcatcgcatattgatgaattttaagcatggcatcccgaagcaaggatggtgccgcggcaaaaccgagcctccagcccgtcattgcaaatgcttttgaaaagcctgagatgactaccgtccgttccttcattcccggtaatgccgctatacttgtaaattcctcatcatatgtcagctccgcgtagatctcgtcggctaagacgatgacatcatgttttttggcaaactcagcaatctcattcagctcttccttcgaataaaccgaacctgtcggattcgatggtgagcagatgagaatggcctttgttttttcagtgactgccgcttcaaaatcagcagccgttgctttaaatcctttgtctgccgttgtatgaacgtgaaccgggataccgcctgccaaagaaacaagcgcatcatacgccacaaaacacggctcaggaatgatgacttcctcacctggattcacaatggcgcggatcgcaatatccaaagcctgacttgcccccactgtcacaatcagctcattatctggcgagtagctaagatcaaacctgttgctcaaataacggctgatttcctcccgcaatgagtataaacccgcattggccgtgtatgacgtatatccttgttcaagagagagaatgcttgcttcgcggacattccacgcggtaacaaaatcaggctcgccgacgcctaaagaaatgacgccttccatcgttgccgccaaatcaaagaatttgcggatgccggatggttttatttgttgtacatagtctgataaatacgaagtcatttacggtgacaccacgattcttttgtcgtcgtctcctgtttcaaacactttgccgtcatgcttgtattttttcaggataaaatgggttgtcgtagatacaactgaatcaagcgttgagagtttatccgaaacaaaacgcgctacgtcagacatcgaattgccgcgaatcacgacagacaaatcgtatacgcctgacatcaggtaaactgattcaacctcttggaatcggtaaatccgttccgccacttcatcaaaaccgacgccccgcttcggcgttactttgacgtcgatcatggccgtaacgccctcatgtccgtctacttttcgccaatcaatcatagcggaataatcgataataaccttttctttttccagtttgtcaataattgtttttacttcatttacagggatgcccgccatctttgcgattgtttctaaatcggcgcggctgttttcgtctaaaatttctaatatttctgtttctttttctgtcagtttcatttgattcacacctttgcaatgtcaagaaatctcatgacattatatcacgttttttgacgaatgctaagaaaaaacgaggagaaacttccgctagaatttacaatttcagggcataatacaaccatcaaaaaaagggagtgacacagaatggaggcggtttcaccaataaggcggtttacggtcgatggagtcaatgtatactacgaacattatcaaaatcccggcaggcaaacgctggtttgcgtacacggttttttatcatctgcattcagcttcagaaaagtaattcctctccttcgggacaagtacgacatcatcgcgcttgatttgcctcctttcggccaatctgaaaaatcaagaacgtttatctatacctatcaaaaccttgctaagcttgtcattgggattttggagcacttgcaagtgaaacaggctgtgcttgtcgggcattctatgggcgggcagatatcgctgtctgctgctctccaaaaacctgagcttttttcaaaggttgtgctgctttgcagttcagggtatttaaaacgttcacacccgacgatcattttcgggacccatatcccgtattttcatctttatatcaaacgctggctctcgaaagaaggcgtgatgaaaaatttattaaatgtggtgcatgacaaatcgctgattgatgaggagatgattgacggctatggcagaccgtttcaggacgagcagattttcaaagccatgacaaggtttatccgccacagagaaggagatttagaacccgagcaattgaagaaaatgaacaagcctgctctattgatttggggcgaggaggatcgaattgtcccaatggagatcggtaaacggctgcacgcagatttgcctaattccgtgctgtactcacttggccagaccggacatctggtgcctgaagaacggcctgaacttgtttctgaacacattgctgattttatcaattaaaaaaaccggtgctgaaccggtttttttaaggcgtgcaggagctgctgtttttaatgaataaaagctggccagccacttcccggcagctgtcgatcggcagcgtttgttcaaaagaagtttcaaatatttgctgaatgcttttcgccagcacgtcaggatcgtcttcatcatagactgcctgcacgacatcaacagcctccgtttcgtaaaactcttctccatatttaaacgggtcccatttggcaatgatcttaatcatttccctgaccgcttgactttcttccatattcatcaccgcttataataaaatttgcagttctatcttatcatagtgaagcttagaagaataaacatacatgagggggtaacagaatgaactttgataaacgagaagaacgccttggcacccaatcggtcaaatgggacaaaacaggcgaattatttggcgtgacagacgcactcccgatgtgggtggcggatatggattttcgcgcgccagaagcgataactgaagcgttaaaagagcgtcttgaccacggtatttttggttatacaactccagatcaaaaaacgagggatgctgtgtgcggatggatgcaaaacaggcacggctggaaggtgaatccggaaagcatcacattcagccccggcgttgtaacggctttgagcatggcggtacaagcttttacggagccgggcgatcaagtagttgttcagcctccagtttatacgcctttttaccatatggtggagaaaaacggccggcacattttacataatccgctgctagaaaaagacggcgcatatgcaatggattttgaagatttggagacgaagcttagtgacccaagtgttacattgtttattttatgcaatcctcataacccttctgggcgttcatggggccgggaagacttactgaagctaggcgaattgtgccttgagcatggcgtcacagttgtatcggatgaaatccattctgatttaatgctgtacggacacatacacacgccgttcgcttcgctctctgacgatttcgctgatatttctgtgacatgtgctgctccaagcaaaacatttaatatcgccggattgcaggcttcagcaatcattattccggatcgcctgaagcgcgccaagttttccgcaagccttcagcgcaatggtttaggcggactgaacgcgtttgccgtcactgcaatcgaagccgcgtattcaaaagggggaccgtggcttgatggattgatctcttacattgagagaaacatgaacgaagcggaagcctttttgagcaccgagctgccaaaggtcaaaatgatgaagccggatgcatcatacttgatttggctcgacttcagcgcttacggcttgtccgatgcagagcttcagcaaagaatgctaaaaaaaggaaaagttattttagagcccgggacgaaatacgggcctggcggagaaggatttatgcgcctgaacgcaggatgctctcttgcaaccctgcaggacggcctgcgccgcatcaaagccgcattatcgtaaatatagctgttaaacgcctttacgtcttcatttgtaaaggcgttcttaataaaggaattttatattttacttctaatatttagtgttataatagattcatattttatacgaaaggatttcacacgaatggaaattctaaaagactatcttctgcacatctgctttattttgtttcctattcttctttaccaagtgttttggcttggaaaacctgcgattcttgtgccaaaaataaacagcggtttggtcacgctcttcgcctgcggcgcctccgttttatgcattattttcccgattcatgaaatggactacatacaatacggccttcagatgattcccgttatcatttgtttattttacattagtaccgcttccggacttacagtcgccgcatctgtcctatgttttgaactgcttttttacgaaccttccgcaatgtttgttttcactttgctgccttttcttatcattatcccaatcttatttcagaaaaaatggccattcatgtccaaagcgaaaaaactgctgctgtctttattgatcagctgcgtggagattttcctatttttcgcctcaagctggattctttccgccttgaatattttaaattttcaaaaatcaggaattttcgtttacgaggcggcagtctcagggcttttccgctccagtgttcttctattaagcatctatattatcgaaagcatcgccgaaaatatcgccctgcgctcacagcttatccattctgaaaaaatgacgattgtgagtgaactggcagcgagcgtcgctcatgaggtcaggaatccgctgacagttgtccgcgggtttgtccagctgctttttaatgatgaaaccttacaaaacaagtcgagtgcagattacaaaaagcttgtactgtcagagcttgaccgggcgcaaggcattattacaaactatctcgatatggccaaacagcaattatacgaaaaagaggtttttgacctatctgcccttatcaaagagacaagctcccttatggtgtcgtacgccaattacaagtcagtaaccgtcgaggctgaaacagaaccggaccttttgatatacggagacgcaacaaagctgaagcaggctgtcatcaacctgatgaaaaacagtattgaagcggttcctcacggtaaggggatgatccacatatcagccaaaagaaacggccatacgatcatgatcaacatcacagacaatggggtcgggatgacagaccatcaaatgcaaaaactcggcgaaccttattattccttaaaaacgaacggaacgggactcggcctcaccgtaaccttttccattattgaacatcatcacgggaccatttcatttaacagcagcttccaaaaaggcactacggtgaccattaagcttcccgctgatcttcctcactagcaaatcgattggaactttaatagaataaatgcgaggtgatgacagatgagcacgtttgagacaggctctatcgttaaaggattttacaaaacaggtgtatacataggagaaatcacggcttgcaggccgcagcattatttagtgaaagtgaaagcggttcttacccatcccgctcaaggagaccttcatcatccaaaacaggcggatgtgccattttttcatgagagaaaagcgctcgcacatggtgaacagaccaatatcccccaccatatggtgaagccttatgacggtgaagtgccggattataccgaatctctgcgggaggcgacagcacagctgagagccaaattggatgaggatggttcggagtgggcaaaacgctcccttcataatctggacattttagaaaaagaatattttaacctgccataacccagtctgacaaaagattgggttttttacgtcgcgcgcttcaacagttcggttaaatcgattctctcgccgattgtgggcggttttggcttttcgagatactgcttatcctgctcaacaagcttaaaaagtttatatgctgtaagagcatcatcaagcgctttatgatgggtgccggttccggaatctccatactcttcggcagctttccataaacccgtcaatgtccggtctccaaaaaagtttttgtattcaagcgataaatctctcatttctcccttaaacgggaaagggatatggttaaacatacagttttgcttcagcactttcatatccatgtttccccacgtaataattgtgctgtttttctcaggatccagctcgtttagtttacggatgaaatcctcgaatctcattccttcgtctacctgtttttgggttatttttaaaaatgatttgcagcgtttcgtaagcttcgggaactttttcggtctaacatagctagaaaacgtctcaaccacttcatcatcaatcgactttacaattccggcttcaatgatttccgggaagaagttttgaggactgtactttccgtcaggcattgtaaattcgaaatcaataatgagtaagctgtttgtcgtcacctttttacacctgcctttcctccgatcagaaaatgctatctttatagtatatcaattccccttctcgacatttcttcattttctaaaaataatgaattttcccagccgcttcgtttcttttaaattgtgaatcgtttctttataattagtaaggaacccgaaataataagaaggtgatgttatttctatccgtaagaaaaactttgtcattgtgtggctggcgaacttttttgtctccgctagcacaacgatgatcgttccttttctctccttatacattgagacgctcagctctttttcaaacggctttgtgcaaaggtggagcggctatgtgttcggcattacatttctcatggcgttcttggtatccccgttttggggacggttcggagacaaacgcggatataagaaaatccttatggcaaccggaacgggcattgccctcagcattttcttcatgggctttgttacatcggtgtaccaattgttttttctgcgtatggcaatgggtcttgtaaccggattcatcccgacatctcttgcgatgatttcggcacagactccgaagagctcagccggcaaaacactcggcacgctgcaaatggggcaagtgtccggaagcttgttcggcccgcttttgggaggcatgcttgctgatcgtttcggctttacgtataccttttttatcacatcctttgtgattttctcgtctgttcttctcgtgttatttggtgtcaaagaaaagcctcttgcagagaaaacagccaaacgtacgtcttactcgaggaaagaagtgctatcctatatttttcaccagccggcgctgtgggtcatgatgctgttaaccatgctgattcaaacaggcaatttcagtatccagcccctgctcgctttatatgtaaatgagctgcatggacctgtcaatcttgcctttttctccggcatggcattttcagcaacggggctcggaagtttgctgctggctagaaaatggggtgatctgggcgaccgctacggccaccgccgcattttaatcggacttttgctcgccgcctctttcttttttattccgcaggcgctcgcgtcctcactcagcgtgctccttgttttcagatttttattcgggatggcgatgggcggtttgctgccatgcattacggcagcgatccgcgttcaggctcccggcagcattcaaggtgaagttctcggctacaatgtcagctttcgctttttaggaaacgtgctcgggcctctgctcggcggaatcatatcgagccattttaccatttcggccaccttttacgtcacggcgtttctctttttcgccggcgcctgcatgctttggatcatgcagaaacttcggaaagattcttatgccaaagcaagctgattccgagaaaaaactgaggaatcttctaaatttaaccttctcgtaatctcaaaagaatggtacgatatggctagaatttaggagaaaagagagtgaccatgttacgaaaaataatcggatggattttgctcctttgcataatcccattgtttgcatttacagttatcgcttccggaaaagaagtaaaacaaatgaagtccctggatcaggtgcttgataaaaatattaatctgaaagatatcagccttgttcagaacagctacatgtatgacagggacggctcccttgtctcggaaatcgtcagcgaccacgaaaaccgtgtgctcgttccatttaacaagattcccgaggaagtcaaacagattttcttaacatctgaggaccgccatttttacgagcataaaggctttgactttatgggaatggtgcgggctactgcttctaacgtaaaagacaagaaaattgaccagggtgccagcaccatcacacagcagctttcaagaaacttatatttgagccacgaacgctccttcagccgcaagctgacagagctcgcgtattcctatcagctggagaaaaaatatacgaaaaatgaaattcttgaagcttacttaaataccatttattttaacaatggtgtttatggcgtcggttcagcagctcaattctatttcagcaaaccgctgaaatctctcacagtgggagaaatggcttttatctgtgctatacctaataaccctacattatatgatcctctcaagcattttgactacacgaaaagccgtcaagaacgtttgcttaaagggctaaaagatgccggggtcattacggacaaagagctgaaaaaagccgtaaaacaaaaaatcaaactggatgttgaaaaaagagaagacaaatatcctgactacgtttcctacgtcaatgatgaattcactcagctggtgtctgaatcagaaggctttgataaacgccttcaaaaagcatcaggaaaacaaaaagaaaagatcgagaacgagctgtccgcaagagtcagcactctgatgaaagacggcgtgaaaatttatactgcacttgatccgtacatgcaaaatcaagttgtggcacaaatgaattccaagctcccgtatgcggacgtacagggcggagcggctgtgattaatcaccagacgcatcaaatcatcgctctatccggcgggaaaaactatcaaaaatatgactttaaccgcgcctaccaggcgtacaggcagccgggttcatccattaagccgcttcttgattacggcccttatattgaacagaccggcgcgacaacaagcagcaccattgatgccagcaagttttgcagcaaagactactgtccgcaaaactacaataaccgcacttacggcacagtgacgcttgatacggcgtttaaaaattcatataataccccggctattagaatgctcgaccgcgtcggcatccaaaaggcattcagttatattgagccgtatcattttgccaaacttgtcgacagtgactatcttcttccggcggcgcttggcggatttacaaacggcatgacgcctcttgagatgacaaaggcttatacgacattcggaaacagcggaagctatacgccgagccatgcgattacaaaggtgacagaccttaaaggaaaaacactttataaatggaatgataaagcgactcaaatattcagcgtccgcacgaacatgcagctgaaaaaactgatgtcttccgttgtgaaaagcggaacagggaaaaaagcatatttcaatgcgccttacatcggcggtaaaaccggaacatcaaatgattatcacgatatgtggtttgtcggcctgactgatacgtatacaatgggtgtctgggtcggaaaggatacaccgaccagcgttgaatatcttcacagcatcagccctcagctttccatctggaaaggaacgctgcaagcggcttattaaaggatcggaggggatatggagtgacttcagaacaaattccaaatcgcgttttgctgtttgacggtgtctgcaatttatgcaatggagccgtgcagtttatcattaaacgtgatccggacggattgatttctttcacatcgctgcagtcggaaacaggacagagcctgctgaaaaaaagcgggcttccgactgatcggtttgacagctttgtctttattgaagacggccaagtgtacacaaagtcaactgcagccattaaggttttcaggcatctgcgaggcccatggcggctcttcgtcctgtttttcgcagtgccgaagcctgtcagagatatggtctattcttttattgccaacaaccgctataagtggtttggcaaaaaaaatgaatgtatgctcccctccccttctattaaaaaaagatttttaccgtaaataaaaaatggctaggaagctagccaacacagattgttgacaaaatcctaaaacggcttcgttttaggattttgtcatcttttcagcgtgattgaaaacctttgaagtcgacgaagagcgagcattggatgtgaaacggcaggaacctgagaatctagccgccgttttattgcgtacagagcacgaagcgcaaatctgaccactaaacgctgaaatggctagcttacacaggtaagctagccattatgctattataaagcttgataaatatgaacagaataccgataacaaaggtaaaccaaaacagcagttccaatagaatgaatccaactaatgacatgagagaaagcgtcgaataaatccggtacacggtaaacacaaagtaagcgagcgtgacgaccgcaaaccagatcacaatccaaatgacattttgcaagagcacaaaggataaaatcccgccgcccaaataaatcatggaacccattctgagttttttcaggttgttcccttccggatcattagcaaaaaacagcaatgacagctcggtcacggtatttgcaattaatttcagagcggacagaaccataaaatataaaagtgcaaaggcagcaaataacgcaagcctgattcctttctctgaaaaataatcgagcattccatcatacattccaaatgaagacagcatcttcaacgcataaagtgaagttgagatggataaggacgaactaaaaagcaggatcgcaatcagcggaaaatatcctgtcaaataagtatttttcatataaaaaagtccctttctataatctacctcatttattatggaggacttaaaacacattgacaagataaattattccattttttctcctttttacgaattacggtcccaaatcttcacaaagcagcattttgagagtaaagtagtacgcaggaatcataaaacgtaaggaagttttatatgaaaaaaacattaaaactgcaaaccagactcaccatatttgtttgtatcgttgtattaatcgcattgctcattacgttttttacagtcggtgcccaaaccaccaaacgaattagagatcaggaaaaggccactgcgctgcagactgctgaaatggtagctgaggcgccgatgacagccgctgctttagaaagcggaaaaaaacaaaaggaactgcagagctacacaaagcgggttcagaaaattaccggcacggaatttgttgtcgtcatggatatgaacggtatccgcaaaacccatcctgacccgagcaaaatcggaaaaaaattcagaggcggtgatgagtccgaggtattaaaagggcatgtccatatcagcacagcctctggcacgctcgggaaatcgcagagagcgttcgtccctgtctacgcggagaatgggaaacaagtcggtgcagtcgcggtcggcatcaccgtaaatgaaattgatgaagtgatcagccatagcttacggccgctttactttattatttgcgtcagcatcttcgtcggtgtgatcggagccgttatcgtcgcccgtacagtgaaaaatatcatgtacggacttgaaccttatgaaattgcgactctgcttgaagaacggagcgcgatgctggaatcgacgaaggaaggaatactcgctgtcgatgaacatggcaaaattaaacttgccaacgcggaagcaaaacgcctattcgtcaaaatgggcatcaacacaaatcccattgatcaggatgtagatgacatcttgccgaaaagccgcttgaaaaaggtcattgagacaaaaaaacctcttcaagacagagacgtccgcattaacgggctggagcttgtgtttaatgaagttcctatccagctgaaaggacaaactgtcggagcgattgcaacattccgcgacaagaccgaggtaaaacatttagctgaacagctttccggtgttaaaatgtatgcaaacgcactgagagcgcagtctcatgaatttatgaacaaactgcatgttatattaggtctcgtccagctgaaagagtatgatgatcttggagattatattaaagatatagccatacagcaaaaatcagaaacaagtgaaattataaatgatgtcaaaagctccgtactggccggttttctgctcggaaagcaaagctttatacgtgagcagggcgcaaatcttgatattgaatgcaacggtgtcatcccgaacgcggcagacccttctgtcatccatgaacttattacaatcatcggaaatctcatcaacaatggcttagacgccgttgccgatatgccgaaaaaacaaatcaccatgtccatgcgcttccataacagcatacttgatattgaaattaccgatactggagcaggcatgtctgaagaagaccaagccaaagtatttgaacaaggctattcaacaaagggcaaaaaccggggattcggcctttatttcacacagcaaagcatcgaaaatttaaaaggccaaatgatcctcacaagcgaaaagaatgaaggaacgacattcagtattcgcatcccgtacgaaccgaaggaggaaaatcatgattaatgtactaatagttgaagatgaccccatggtgggtgaattaaataaacgatacttaagccaaatagatggctttcagctgaaaggcatcgcttcttcctttcaaagcgctctgcatattttaggcgagcaccatatcgacctcattttgcttgatatttatatgccgggaaaaaacgggctggaactgctgacggaattgagagcccaaaatgaagcggttgacgtgattgtcatctcagcggccagcgagcttgacgtaatcaagaaaacacttcggtacggagctgtcgattatttaatcaaaccgtttgaatttgaacgtttccaaacggctctgtctgattacagacgaaaacaaaaggtgtattcaacccatcgcaacatgagccaaaaagaactggacgccgagctttttcaaaagaaagaagcaacagaaaaagtgcagcttcctaaaggcctgacaaaaagcacgctgaagctgatctggtccagtatccagtcatttgaaaatgaatcttttacgacagaagacttggcaaagcacacagaaatctctcaagtatccatacgaaaatacttaaagtttcttgaagatatacaagttctgaatgtagaaatggcgtacggaacgatcggaagacctgtgtttcagtacaacgtaaacaacagtaaccttaacggaataaagcaatatctataagaaaacgcactgcttgctttgagcagtgcgtttttctgtcatatctcttgccaagatgcttgattctattgttgataagttatacaagaataacaaagggctttcacatttttaagcaaataattctaaaaatagatactttttaaaaaattatgcgaaattctatttatttcttattagttaaatgataaattatgattggttagttgatcccgaaaaactaagtcataagtcttacttcagaaaacgatgtcacggttttccgcccggaacgccttccgcatccttctcttccccgcctttcgaaggaaatactcacaccacgcttattcagggaagaatagaactgtctcagcgcattccatttgttattatcagaaaattttatcgattctaagaaattgttcaggacagcccatcacatgactggccggatcagctttgaaccaaatttttctggggggttatatcttgaataaacgaaaaatcggattggcgatgtcacttgtgatcgcagcaggcaccatattaggagcatgcggaaacagcgaaaaaagcagcggctcaggcgaaggcaaaaacaaattcagtgtggcgatggttactgacgtaggcggagtggatgacaaatccttcaaccaatcagcctgggaaggcatccaagcctttgggaaagagaatgggctgaaaaaaggcaaaaacggttacgactatcttcaatccaaatcagatgcagactatacaacgaacttaaataaattggcgcgtgagaattttgacttaatttacggcgtcggctacttaatggaggattcaatcagcgaaattgctgaccagcgcaaaaatacaaactttgcgattatagatgctgttgtcgataaagacaacgtcgcaagtattacgtttaaagagcaggaaggctcatttctcgtcggagtggccgcagccctatcaagcaaatcaggaaaaatcggctttgtaggcggcatggaatcagagttaatcaaaaaattcgaggtcggcttccgtgccggcgtacaagcagttaaccctaaagccgttgtagaagtgaaatacgcaggggggttcgataaagccgatgtcggcaaagcaaccgccgaaagcatgtataaatcaggcgtagatgttatttatcactctgcgggcgccactggcacaggcgtctttactgaagcgaaaaacctgaaaaaagaagatccaaaacgcgatgtctgggtcatcggtgtcgataaagaccaatacgcagaaggccaggtagaaggaacagatgataacgtcaccctcacttccatggtgaaaaaagtagatacagtcgttgaagatgtaacgaaaaaagcgagtgacggaaagttcccgggcggcgaaacacttacctacgggcttgatcaagacggagtcggcatttctccatctaaacaaaatctatcggatgatgtgatcaaagcggtcgataaatggaagaaaaaaatcatcgacggattggaaatcccggcaactgagaaagagctgaaaaccttcaaagctgaataagaatcgcagggataaggaggtcgagcccttatcccttgtttttcttttattttgaaataaaggagcggtcaatcaatggaatatgtcattgaaatgctcaatatccgcaaggcgtttccaggtatcgtcgccaatgacaatatcaatcttcaagtcaaaaaaggcgaaatacacgcgttgctcggtgaaaacggagcggggaaatcaacgttgatgaatgtccttttcgggctgtatcagccggagcggggtgaaattcgggtgcgcggcgagaaggtgcacatcaacagcccgaacaaagcgaatgaacttggaattggaatggtgcaccagcactttatgcttgttgacacctttacagttgctgaaaatattattctcgggaaggagccaaagaagtttggcagaattgaccggaagcgtgctggccaagaggtgcaggacatttccgatcgatacggcctgcagatccatcctgaagcaaaagcagctgacatatcagtcggtatgcagcagcgcgcagaaatattaaaaaccctctaccgcggtgccgacattctgatttttgatgaaccgacggctgttttgacgcctcatgaaattaaggaactgatgcaaattatgaagaacctggtcaaagaagggaagtccatcatcttaatcacccataagctgaaagagattatggagatttgtgaccgcgttacggttatccgtaaaggaaaaggcatcaaaacccttgatgtccgtgatacaaaccaagacgaactcgccagtctaatggtcggccgcgaggtatcgttcaaaactgaaaagagagctgctcagccgggagcggaagtgcttgcgattgacggcataactgtaaaggatacccgcggaatagagacagtcagagatttgtctctttctgtcaaagcgggagaaatagtcggcatagcaggcgtcgacggaaacgggcaatcagagctgatcgaagcggtgacaggactccgcaaaacagattcaggaacaatcaccttaaacggaaaacagatccaaaacctgacgccaagaaaaatcactgaatccgggatcgggcatattcctcaggatcgccataaacacggtctcgtccttgattttccaatcggagagaatatcctgctgcaaagctattacaaaaagccgtattcagcattgggcgttttacataaaggcgaaatgtacaaaaaagcacgcagcctgatcagcgagtacgacgtcagaacgccggatgaatatacacacgctcgggcattgtcaggcggaaaccagcaaaaagcgattatcgggcgggaagtagaccgaaatcctgatttattaattgccgcccagccgactcgcggccttgatgtcggagcgattgaatttgtccataaaaagctcattgagcagcgtgatgccgggaaagccgttcttctcctctcgtttgagcttgaagaaattatgaatctcagtgacagaatcgccgttatttttgaaggacgcattatcgccagcgttaatccgcaggaaaccactgaacaggagcttggtctcttgatggcaggaagcacgcaaaaggaagcggggaaagcaaatggttaaacgactctctcatttactcgtgccgctcatcgcaatcatccttggtcttgcggccggcgcgttgattatgcttgtgagcggctacagtgtggctagcggatattcggctttgtggaatgggatattcggagaaatctattatgtcggagaaacaatccggcaaattacgccttatattttatccggattggctgtcgcctttgcattccgaaccggactctttaatatcggcgtcgagggacagctgctcgtcggctggacagcagcggtttgggtcggtacggcgtttgacggaccggcatatattcacttgccgctcgcattgattacagcggcagctgcaggaggattatgggggtttattcccggcattttgaaagcgcgattttacgttcatgaagtcattgtcaccattatgatgaattatatcgcgctgcacatgaccaattacatcatttcaaacgtcttgacagatcatcaggacaagacggggaaaattcacgaatccgcctccctccgctctccttttcttgaacagatcaccgattactcacggctgcatttgggaatcatcgttgcccttctcgcagcagttatcatgtggtttatcatcaacaaaactacaaaaggatttgagctccgggcggtcgggtttaaccagcacgcttcccagtatgccggcatgagcgtgcggaagaatatcatgacctccatgcttatctccggcgcttttgcaggccttgccggagccatggagggcctagggacattcgaatacgcagcagtgaaaggcgcatttaccggcgtaggctttgacggtatcgctgtcgctcttctcgggggaaacacagccgtaggcgttgtactggcagcatgcctgcttggcgggctgaaaatcggcgcattaaatatgccgattgaatcaggcgttccatcagaggtcgttgatattgtgattgctattattattctatttgtggcttcaagctatgcgattcgtttcgtcatgggcaaattgaagaaaaagggggcgaactaagtggacattgtgcagattttatctatcattgtccctgccacactcgtctatgcggccccgcttattttaactgctctcggcggcgtgttttccgagagatcaggtgtggtgaatatcggcttagaaggcctcatgattatcggggcgttcaccagcgtgttatttaatttattttttggtccggaattaggtgccgccgcaccttggctttcgctccttgccgccatggcagcaggcgccctgttttcactgattcacgcggcagcggcgatttcgtttcgcgccgaccagacagtcagcggtgtcgccattaacatgctggcgcttggggcaactttatttatcgtcaaactgatctacggcaaagcgcagacagacaaaattccagagcctttttataagacgaaaatccccggtttgggcgatattcccgtcttgggaaaaatcttcttttcggatgtctattatacgtctattcttgcaatagcacttgcctttatttcctggtttatcttattcaaaacgccgttcggccttcgtatccgttctgtcggcgagcatccgatggcggccgatacgatgggaatcaacgtatataaaatgcgctacatcggcgtgatgatcagcggattgttcggcggtctcggcggcggcgtatatgcctccacaattgcgcttgatttcacgcactctaccatctccgggcaaggttttatcgccctggcagcgcttgtattcggaaaatggcatccaatcggagcactgggggccgccctgtttttcggattcgcccaaagcttaagcatcattggatcactgctccctctttttaaagacataccaaatgtgtatatgctgatggctccttatgtcttaacgattctcgctttaaccggctttatcgggcgggcagatgcgccaaaagccaatggcgtgccttatattaaaggaaaaagataaaacattctcccctgggaagacgattctcaggggtttttttctaatccaaaagacccccttaatttaattgtttattagttttttaacttaaaaaaatatgaagtgttaacgctttcttgtagactgtaacaaacaatacatgggggtgtatgacatgggagcaattccaaaaacggggacaatttcacctgagcaaaaagactcacaggggaaaaacctgtttcaaaaaatctggtcttgggaaatcggtgtgattcctctgcctttatacacagtattagctgttattattattcttgcagcctattacaatgagctgccggcaaatatgcttggcgggtttgccatcattatgattcttggtgtgtttctcggagacataggccaacgcataccgatattgaaggatattggcggccctgctattttatctttgtttgttccttcatttttagtcttttacaatgtactgaattcaacatctttagacgctgtaaccaacttgatgaaaacgtctaacttcctttatttctatatcgcttgccttgttgtgggaagtatcctcggtatgaacagaattgttttaatacaggggtttatcagaatgttcgttccactggttgcaggaacgatcgcggccgttgcagccggcatccttgtcggatttatttttggctatagtgcctatgattcctttttctttgttgttgtcccgattattgccgggggaataggcgaaggaattttgccgctttcaatcgcctactcacaaatactgggctcatctgctgatgtatttgtgtctcagctggttccagccgcaattataggaaacgtttttgctatcatatgtgcagccttaatgaaaaagcttggcgataagcgtccagatctaaatgggaacggacgtctcgtaaaatctaaaaaagcaaatgagattttcaatcaaaaagaagccgaagcaaaaattgattttaaactaatgggagcgggagttctgctcgcgtgtacattctttatttttggcgggttattggagaaattcatcttcatcccgggcgcgatcttaatgattatttcagctgcggctgtcaagtatgcaaatattcttccgaaaaaaatggaagaaggcgcttaccagctttataagtttatttcttcaagctttacatggccgctgatggtcggtctcggcatcctctttattccgttggatgacgtagcgtctgtgatttctataccgtttgtcatcatctgtatttcagttgttatcgcgatgattggttctggatatttcgtaggcaagctgatgaacatgtatccggttgaatccgcaatcgttacctgctgccacagcggtctcggcggaacgggtgatgttgccattttatcggcatcaggaagaatgggccttatgccgtttgcccaaatttcaacccgtctcggcggtgcaggcacagttatttgcgcgacagtgctgcttcgttttttcacttcataaacagaaagagttccgttttatgcggaactctttttttatttattcacaatccgaatatactctcggggaccaaacggcagatcctttgattccatctcactcattctggctgacaggtggtgctccagtaaatacagctcccactcatcactagccgccacaccgctgcgcccgtcatattgattcaacatgaatgcccctgcaaatactgagcagaataaacctgagcacatcacgacttttcttttcacatgaccagctcctttccttcagcttgatcaggattgattttaaatatacaaataacctcttttttgttagacttattttgaggtcaaaagaactcataaaaacccattacagcagttcgaagcgtggcagcttgcagaaaagtgcgatataatttggactaggtcgtttgaccgtatatttcatacatagcgcatttttcaattgagaacgagaaaaggaggtcttatctttgcagctcttacatcttgctattttatcgccttttttatttgcttttatcattcccttcttggcaaaatacgcaaaaagagtgcatacgggctggtttgtgttgatcctgcccgtcttgctgtttatatactttctcccaatgatcaggatgacacaatctggagaaacacttcgatcggtattagagtggattccgtcactcggcattaactttaccgtttatatagacggcctcgggttattattcgctttactgatcacaggcattggctctttggtcactctttacagcattttttatttatcgaaagaaaaagaacagcttgggcccttttatgtctacttattgatgttcatgggcgccatgctcggtgtcgttctagtagacaatgtcatggttctctacatgttctgggagcttacaagcctttcatcctttttgctgatcggctattggtataagcgagaaaagtcgcgctatggcgcagccaaatcacttttgattacggtcagcggcgggctgtgcatgctcggcggatttattctcctttatttgataacggattccttcagtattagagagatggttcaccaggttcaattaattgccggccacgaattgtttatcccggctatgattctcattttattaggggcttttacgaaatcagcgcaatttcctttttacatctggctccctgacgcgatggaagctccgacgcctgtcagcgcttatctccattcagctactatggtaaaagccggcatttatgtgattgcgagattcagccctattttcgccttttcagctcagtggttttggatcgtgtccctcgttggcctctttacgatggtttggggttcattccatgccgtgaaacaaactgatttaaaatcgattttggcgttttcaaccgtcagccagctcggcatgatcatctccatgctcggagtcagtgctgcggcccttcattacggacatacagaatattatacagttgccgctatggctgccattttccatttgatcaaccacgcaacctttaaaggaagcttgtttatggcagtcgggattatcgatcacgaaacaggcacacgggatatccggaagctaggcggcctgatggcgattatgccgattacatttaccatttccttaatcgggacattttcaatggccggcttaccgccgtttaacggatttttgagtaaagaaatgtttttcacaagcatgcttcgcgtgacacattttgacctgttcaccgtgcagacatggggcgttctgttccctcttttcgcctggatcggaagtgtatttacgtttatctacagcatgaaattgctgtttaaaacattcagaggaaattaccagcctgagcagcttgaaaaaccggctcacgaggcgcctgtcggcatgctcgtaccaccggtcattcttgtcgctttggctgtcagtctcttctttttcccgaatatattgtcgtacagcctgatagagcctgcgatgaactcaatctatccgacactgcttgccggccatgagaaattccacgttcacatttcacagtggcatggggttacaacggaattgctcatgactgcgggtattgttgtgatcggaacaattggttatttgtcgctgaataagtggaaaggaatctataaactgtttccttcgaaactcacactcaatcggttatacgataagcttttgactctgatggagaaaggctcttaccgggtcacaaaacaatatatgaccgggtttttaagagattatttgctgtatatcttcgctggtttcatcattctgataggcggagcttttgccattaaaggcggattttcatttaaaacggaaggcatggctaaaatcggtgtatacgaaatcattttgacgcttgtcatgatcagcgccacagtggcgactgtttttgctaggtcaagactgacggcgatcattgcactcggtgttgtcggttatacgcttgcattgttttttgtcattttcagagcgccggatttggcattgacccagctcgtcattgaaacgatttctgtggcactgtttctgctttgcttctaccatttgccgaaactgaggctgaaaacaaaaacgagaacgttccggatgacgaattttatcatttctttaggcgtcggtattattgttactctgcttggtatcgcatcctcaagccagcggacaaaagacagcattgcgtccttctttgtcaaacacagccacgatctcggcggaggggataatgtcgtcaatgtcattcttgttgatttcaggggatttgatacaatgtttgaaatcacggtattaacgatagccgctctcggcatttacagcatgattaaaacaaaagtaaaagaggaggggaaaagcggtgaatgaacaaaaaacaaatgacttgattcttcaaaccgcgacaaaacttgtatcctttatcattttgcttttctctttctatttatttttatcagggcataacgcgcccggaggaggctttgtcggcggactgatcacgtcctcttccatcgttctcttgctcttggcgtatgatttaaaaaccgtgcgttcccttttgccggtcaatttcatttatgtcgcgggagccggccttctgctcgctgtattaacaggcgttggctcctttgtcttcggagctccttttttaacccacacattcggatactttcagctgccgatccttgggaaaacggagctcgccacagcgacgatatttgatttaggcgtttatcttgttgtcgtaggcataacgatgaccattattcaaacgattggagaggaagaataatggaaatcttaatggctgtattagccggtattatttttatggctgctacgtatttgctgctgtctaaaagcctgcttcgcgtcattatcggaacagcactgttaagccatggcgttcatttaatgcttttgactatgggaggattaaagaaaggcgccgctccgattttgagcgagcatgccaaatcatttgtcgatccgcttccgcaagccctgattttgaccgcaattgtcatttcttttggcgttacatcattcatcctcgttatggcctttcgcgcttatcaggaattgaaatcggacgatatggatcaaatgaggggaaatgatcaacatgaataattttgttattttgccaatcctgatcccgcttttgtcggctattcttctgattttcatgacgaagaatcttatgctcatgagaatcttcagcacggcggcatcggccatcgggattgtgattagcggcatacttgtacagactgtcttcacaaaaggcatccagacactcagcttaggcggctggaaagcgccgtacggcattgtgcttgccgcagaccaattcgccagccttctcgttctcacaacagcgatcatcggtttattggttgggctttattccttccgttctgtcggtgaaaaacgggagcgctccttttactactccggcgttcagttcttgcttgccggcgtcagcggagcgtttttaacaggcgatttatttaatatgtacgtattttttgagcttctgcttattgcttcctatatgctgattgtattaggcggtacaaaaattcagctgcgggaatcccttaaatatattgtgtttaatatcgtatcgtctgccctgtttgtcataggggtcggctttttatacgctgtaaccggtacgttaaacatggcagatcttagcatgaaaatcagcgaaacaggacaaaccgggctgatcactgtgattggtgtcctgatgcttttggtatttggcatgaagggcggaatcttccccctctacttttggcttccaggctcttattacgcgccaccggcagcaatctccgcgttgttcggcgctttgctgacaaaagtcgggttatatgcgattgcgagggttttcacattgatttttattcacgatacagcctttacccatcagctgatgatttggctggcggcgctgactgtgatttttggtatcatcggttcactcgcttattcgaatgtcatgaaaattgtgatctataacattattaccgctgtcggcgtgattttgttcggtgtggcagtacacaccccagcatccattcagggcgcgatctactatctgattcacgatatgctgattaaaggcgctttgtttatgctggcgggtacgctgatcgcattgactggaactgcgagcctgcataaaatgggcgggctgatcaaacgctatcctgttcttggatggatgtttttcatttccgctatttctcttgcaggcattccgccactgagcggatttgtcggcaaatttaaaattgcggagggcggcttcgcagaaggtgaatttacgatatccatgctgattctgctttcgagtctgcttgtactgtactctgtgctgaggatctttatacatgcgttttggggcgaagaaaaagaaacgccaaaaccaaatcatcgaacagctaaaggacttctttatccggcagctatttttctcttgctgtctcttctcttcgggttgggtacagaatgggtgtcgccttacgttgatcaagcggccgagacgctgctgaatccggaaaaatatatcgaagctgttctgaaggagtagatcgcatggcttttcaaattttattaaatgtgtttctcgctttttgctggatgttcttaagcaacagtccaagcgccgcaggattcattacaggctatattctgggaatgctctctctctttttcttccggcgctttttcactcgccagttttatctatggaaattgatttctatcatcaagctctgtttcatttttataaaggaactgtaccttgccaatgtcagtgtgatgaaatcagtcttatctccaaaactgaatatcagaccgggtatttttgcttttaaaactgaactgacgaaggactgggaaatcaccctgctttctctgctcattacattaacgccgggaaccttggtgatggatatttcagatgacagaacaatactttatattcatgcaatggatatcgaggatgcggaaaaagcgatttttgacattcgggagtcatttgaaaaagccatacaggaggtgagccggtgatgtttacgctgatcctgcaaatcgcgctcggcattatggcagtgtctacctttttgtatgtcattcgtgtcattaaagggccgactgtgcctgaccgggtcgtggctctggatgcaatcggcatcaatctgatcgcaatcacggcgcttgtctccattttgctgaaaacaagtgcgtttttagatattattttgctgctggggattttatcgtttatcggaacgatcgcattttccaagttcctggagaaaggagagattatcgaaaatgatcgaaaccgctaaggtcgttgtggctgtattcattttgctgggtgctcttatatgcctcattgcttcatttggcgtacttcgccttcccgatgtgtttacacgcgctcatgctgcttctaaaggctcaacattgggtgtcaatatgattctgctcggtgtcttcttctatttgtggtttgtgacgggggagctctccgctaaaatcctgcttgggattctctttatctttattacgtcgcctatcggcgggcacttgatctgccgtgctgcgtataactccggcgtcaagcttgatgagagaagcgtacaggatgactataacggaatcagaaactttgtgattaaacgaaaagaggattcttatctataaaaataagcagccggacaggcagagttccggctgtttttttatttcttgatgacagccagcgtgcatctggatatacagatcagcctctcttgctcgtcatatatgtgaatgtgatagacaatcgtcgttctgccgatatgaacgggctcggctaccgcctttaccgttccttccttgacagattttaaatggttggcgttaatctccaaaccgacacaagcctgtgttgaatgatcaatcaggttctgtgcacctgcgctcgccgctgtttccgccagggccactgaagcgcccccatgcaaatatccgaacggctgcaccgtccgatgatccaccggcatgaccgcaacgcaacgttccgctgtgttttcaacaatctctataccaagcgcttcaagcaatgtgtgcttcgtatccatcatctacacccccaatatttaaagtacaccgtctgatttcgcaatcaaaaccgcttccgtccgggaaccgacattcagcttattaaaaatcgatgtcaagctgtattcaatggaccgcttgcttaaatgaagggcatctgcgatttcttggtttgtaaatcctttttcaacttcttgaagaatcaggcattctctaggtgtgagcacatcttgttctttttgagaggaaggagccggctttgttttttgctgagtcatcagctgtttaaagtaagcaaaatcgactaaaatttctccattgagtacgtggtatatgtattgggtgatcttttctttagattccgttttgctgatggcaccgtgcagacccgcacgaatcgcttcctcgaaataatcctcgacctcataaccggtatacacgataattttacaatgaggattctcttgtaaaatctgtttagaaagctccatcccattgacctcgccgcctagattcagatccattaaaatgagatcatatgacgagaaatcatgctgcttgataaactgttcgctcggttcaggactgagacaatcaacagacaaattcgaatccgtttccaaaattgtcttggtgccttccatgacagccggatggtcatcaatcactagtatctttttcatgttttcctcccttttactcactcttttccattttataaaaaagacttggcctgtgccaagtcgtttccgttataaatccattacaattcgatttcaatatcagccttaaagccctttccttcacttgtttcaatccgaaggcgcccatctaaagccctgactctctccttaatgccagaaagccccatgctcatggaatgctcagtatttttttcttgatcaaaccctacgccatcatcctcataatgaagaacgattttgttttgaatactgatgagcataatcagcacatccgtcgcctgagagtgcttgaccgcattagacagaaactcttgaatgatccggtacaaattcagctgcgaatccagatcaagggaagccgtaaatctcccggtatttaaacggatatgaaacggaacccgctcctgctgctgcgccaccagcttcgacagcgccttcaccaatccaagatcatacagaagctgcggccgcagctcatgacacgtctccctcgtcatcgaaatcacatcagacatctgctcattcatctgcacaagcttgtcctgcacctcttcacggcacggattatcatccttcttaaaatcacccaaaaacagctcacactggcgttttaaggaaattaaatcctgaagaaccgaatcgtggagatcgcgggcgagatccgagcgttgtttttcctcgatcgtgtacatgagttttttgagccatacggggttggattcttgttgttttatttcttctaaatgactcatcagttcttcgattttcatgacgttttcgatcgatacgtttgtataaaaagccaaagttttcagccaagaaagttcttcgagtgtgagacgaggcgtattcattttagataaacaaaggatcacaaatgatttaccaccgcgttcacctattttcatgacaaagcctttattaaattcaacgattttccctatttcggatgttacttttctaaattctttttgatagactttttcaaatgaatttacgttctcatcatcatatagtttaatatttccgtcagctgaaacttcatatacatgtgctcggctaacaagagaaacctcaagtatagtatttttcagttcttcaaatacttgagatagggaagtagagtctcttatcatctgcgtgaatttatatatactgtcttgataattgaatttttctgagaccctttttaatctaaatctgaaatcaagtacttctttataataaaagaccgccaacatgataatataaattaaaaaggttagtttaacactataaaaatcactatcaggactactaattaattcaattgtagagattagaataattgttggcgttagagctaaaaagccatagtaccttaatctgcttaaaataaaatctacattatagattttatttgtcatgaattgaaataccaatgagaatggtatcagcagcataaatgaagccgctaaaaaagaagaaacataatgtgcatttaaaaacacgtaaggtatcaaatataaacacagaaaaggcgaaaaagaaaagatattaatgatagtgagaaccttaataatatgtgcttgttcagtgtctttatttttaattagtatgatactaaaataaacccctactataataaataaaaagaaaaaagcaagtaaatttaatttaggaacataatctcgaaagaaaagatgtgaacgaaaaatttcacaaactacatttatgaccggaatcaaatataaaataaaaactttcttattaaataatttggttcctaattctttgaaatattgataaagaaagagaagatagtttagcggaacagatattaatgttaccaccattataagcctgctcagcatatctcccttagcagaccctccagcacttataaatgcaatagaggcagacaacagaaagataattaaaactacagctgagagaaggttctttgattcatttatttttaatataaaaaagcaacaaaataaacaaacaatataaaatattaacggtattaagtaagtagtgaaatttttatcattaaataaggtcattttcaactcaagattatgtccatttctttccacaatcatcgaacttacattttttagtttgttcatttttatttcgtttgtgtttatctttttattattaatactctttacgatatctcctttttctataccgctgtatgaagccattgaaaattcatctacattggtaattacaatatcgccattttttcctttagagacagttgcccctactaataaattattattactaatataagtcaaataaataacataaatcaaacttaatacaactaacactacagaaattttgttatttctagacttcatttaaacctcagtacttccaatctagcattgaataaatttctaatcctttaaaaccatttattatgcattcagattgatcattatcaacacccaataaacaagcatttccttccattacttcccttaaaacatttgggtatttaattaagtatcctaccatttcttgcataataaatcccctccttatttaatcataacagacaataatttttcagttttatcttctcctagttttaattgtgacatttcattttttattttttggagagataaatgtttcatcaccagtaaatattgtataacgcctgcttctgtcaattttcgcttcaaagccttagtattaattgaaacaaattcctctggtttttgatataaacttagtagctccgctgaagcatcgttaaattgtttctttaagtataagtatgccaatgtattttttttctgaacaaaatcgttatttaagtaaaacaaacctttataatcattatcgatctgtgaaataatcccaagttcataagaataagaagccacgatgggatgatatttgcctgttgccaacattactcccattacacaaggcaatgccgttagcgctcctgatttatttttgatcatttcaagacaggcttcttcagtttgcggcgcattcacaatatcatcatgctggccttgaattgattgtaacgcaaaattcaatatctcttgtgaaaattctggttcatgactagcttgacacatcacttgtatacttagggtgtaaagagctgtaactgcatttaaagcgattgacgagtcaatcttcatccagacagcacttccattatcttgatcctctaagtcatcataaatatcgaatgagagtataagcaattcaattccggcagctagccattcgattgctttttggtcctgaccgttaaaagctaaataatgatgaagagccaaatcggcaaactcaaacgtatccttagactcaataaaattctgaagatatcgttccaagtcctgattcattattttttggcttacaatctccttcattttctccttgatccggacagaatctaaacatatctgctcaataacgacttcccccctcccattccattttactaaatgggacatttaaaggacagcaggtttttcgttttttaacaatcatataatactttatccatttattgtatcggtagaacgaaaaaaaagacttgtttccaagtctttttcacgaaattttcattgcataattgtatttatcgagttgatcaatgcttttgttaatgtttcgtaatgaatctgtcgtttctttaatatcaagttcgagtcggaataacaattgttttacttcttcaagtttcttttccatcgtttccacactcctttttttgaaagatcaatgaattgtgtatggtgaacgagtcctaggtatttgatctgttactaatagtgtatctgctttcggctcatttttcaccgaaaagtatgcaaaaaagtcctgcgtgacaccgcaaatctcaataggtccttatactcaaaggaatcacaacaagaacgggactatctttctatgcgaaagagcgtttatatgtgctgaaattgagaaagattcttaatctccttgattttaacgggtttcgcattttcattaagcaagactatagtccttcataccgtattttcaaaattgaatatgcgattcttggcgtttcctgaccgacaaacaccgaaaaagaccgcaacgctaaagttgtggccttttcgctttgtcatattcggcaattagggatctatacatatagaaacatccttttttgcgaggtgctcccatgagatatcgttatccctggttttacgtgtatccgtatgaggtacgccgtccgcccgctcctgccaacaatattgatacctttatccgttcagcgaggcaggccgcagggatatttgcggatgcccagctcgttctcggccgcattgcgggctcgcgggagctctcgcgccgcattctgacggcagccgagcagtccgataaacaaaccatcaagcgcctgatcaaacaattgggcgtccggcatgaagtggatacggtctttaatcccgacggcatctatatcagtcttatcggaacgcaaagccgaatgattcttgctttgcggtggtcagaggaccgcaatcattttgcgtccataagattatgacaccattccagagcctcaagataacattcatacgcttcttctttgtcgagttgattgcctaattccgagcaagtgtcccagttgttgctttcaattaatttcacaagctcaagcatttggtagtagtcgttttgatggcctaataatgcttgcccgacttcatcttttaaaggcaattcttgaacaatttcctctatttctctatgcaggagggtgtctatgagagaaaacattccgatcagcatataagaagcaggctgcggccgggatgtctttctcgccagcagttcgcaaagctttgctcttatcaaagaaatcttaatgatttcgtgcttgctggaatgccctttcctgcttaaatccttaaaggaaagaatatagatccaccgtttgatttcattaaatcccagcagcataatggcctgttgaatgctttcaattttctggctcaaacggctgtgggatgagtttaaaaattttaaaatttgataggacagtgataaatcccgctctatgtactctgtcacacgctttatgttaggctgctctttactcagttcgttaagcagttcatagtaagaatagaaatgagtcgataggtcatgcccgctgatgatgcgcggctcgctgaaaaagtagccttggaataattgaaagccgtcttggaccgcctgtttatattcttttcgggtctctactttttccgctaaaaaaatcaggccgcggcagccgtaggtttgcaaaattgttctgcgttccattcgtgttgttttgagaaaatcaattttcaatatatcaatatagctcatgagtttttccagtaagtcctcatcttgcgggtttattgcataaaaatcatcaagcgccagcatataccccatttttttcaattctttgcatctagaaatgagggccggcgtgatcggtatatcttcaaggatttcaatgacaagctgtttcggattgaaggaggtaggaagattcgaaaacatcaggctttccgtaaaattaacaaaacagcgtttcccttccgtcagcttctcaattccgatgtttaaaaagctgttgatcaccaaatctgttgttgcctgatcgccgtctttagcgctatacacgttctcttcgctttctctatacagcagttcataagcaacaacctgttcttttctattaaaaataggctgtcttgcaacaaacaccctcattgatttatcccccttacaatacgcgcggctttcacccctaagtatatcaaataatttgacgaaaattgtctaaacatgaaaaataatatatacataaagaaaactggcccttcgtgaacgaaaggccagtttttctttattcttcctcaagctcttcttcaattctgcttttcacttcgtggatccgctgcattttattgctccagcagtcctcgcttaaatcaaccgggtattcctccggcttgctgattctcttatattcctcccaaagcaggctgaggttatcctgcacatactgctgtatgtctgaaatctcagggttttggtagcaaagaatacccttctcaaaaatcagctcatgaagatccttcgcataaaaattcgtgacaaatttgctgatgaatgtatgaaccgggtggaacattctgagccgcttctgatcattcacctgctcatcataaagcgcaatatagtcgccttcagaatgatggttggactgattaataatgcggtagactttctttctgcccggtgtcgtcactttttcaggattggacgaaattttgatcgtgtcaaccattttcccgtcttcttcaatggcaacgagtttataaactgcgccgagagccggctggtcataggcagtgatcagcttcgtaccgacaccccagacatcaatgcgcgctccctgagcctttaaattcataatggtgtgctcatccaaatcgcttgaagcaatcaccttcgcatctgtaaatcctgcttcatcaagcattttccgggctttttttgacaggtacgccaaatcgccgctgtccagacggatgccaatgaaattaatgcggtcgccgaattccttggcaaccctaatcgcgttcggcatgcctgaacgaagcgtgtcatacgtgtcaactaagaaaacgcaatccttatgtgtttccgcgtattttttgaaagctgtatattcatcgcggtaagcctgcacaagcgcatgcgcatgtgtgccggaaaccgggatattaaagcgctttccggctcttacattgcttgtcgcgctaaagccgccgattaaggctgctctcgctccccacatggccgcatccatttcgtgcgcccgtcttgttccgaattcaagtgcaacttcatcaccaatgacgcctttaatccgggcagcctttgttgcgattaatgtttgatagttcacaatgttgagcaaagctgtttcaatcagctgcgcttctaccaggggtgcctccaccctcataatcggctcattgttaaaaacgagctctccttctttcatggagtaaagtgaacctgtaaaagataagccgcgcaaatattcaataaaatcttcatgatacccgagttcatcctgtaaataactcaaatcgctatccgtaaacttgaaattttccaagtattcaatggctttttccaagcccgcaaatacggcatagccattttcaaacggaagccttctgaaaaacagctcaaaaatcgctttcttttcatgaatgccgtctctccagtacgtttccgccatattgatctgataaaggtctgtatgtaatgacaggctgtcatctttaaatccgtactctaacactgtttttccccttccttactctgccacttgcgctccgatgctgtttgcaaaatgggaaagagcccatgcgtgcccctcctgattaaagctggcaacagcttgtttatgcacaacaatcccaaaacctttgttgtatgcgtcaacagctgtatgcaacacacaaatatctgtgcagacaccggcaaggtgcagttcgccaatctgccgctctctgagtttgagctctaaatcagttcccgcaaaagcagaatatctcgttttttccatgtagtaaacattaggctcatgttcatgtttctgatatagaggcaaaagctttccgtacagatcttttccttccgtgccttttatattatgcggaggaaaaagacgggtttcagggtgatattgatccccttcatcatgagaatctactgctaatacgacgtaatcaccgtttgtgatgaattcttcagttaaattgacgatcgcctcttcaatcattctgccgggctccccgcaggtcaattttccgtcactcgccacaaaatcattcgtataatcaatacaaataagtgcttttttcatagccggcctccccgccatcagtatgagaacattatatcttatctccagttgtaagtgaattgccatgaacaaaaagacaaacggtccgtttgtctcttaagatttcagcactgaccgattataaatgtcgtcctgaatatatatcaattcacgattcacagcgatgtcagccgcaatgacgatgcctaaaggcgtatgaaactgaagatcagatacaatcttgaagggcactccgtaccggttcgccatttggatataaggagagtaagactgatactgaagctctccattaatcaaaagggtgacgttatggctgtttttcagctcgtgctccgcctctttatacggtttgcttctaagcacctgtccttttgtcagtgccaaaacgactctttctcttagagaacctaaaaacaagtggcgctcgtcaggctttgtctccaaaggcccatacattccttgctgcaaatagagatccattttatcttcactcaaaagcctgtcctcccgtcttgtttgtcttcattatcacctgatcaggcaggagctaaactttcaagcgccgtttacatttctgttacccaatgaatgatttttttggccagctcaccagcagggatttcctctgtatgccggcgcaacgacgcttccagccgttcaggcagagttgctttatcttcttcataggaaatgatcgtgctccactccagctgcggtaccgctacaagcgtgcgcagttcttttctgttttcatgcagatacacgtccgtgatcattccggtttgcgtattgatatttgcttttctgattttcataacatgacctctctattcaaagactacccatattatacaataaaaaagcaacagcctcttgtgaaaaggctgttacccgttaaacgaaactgtttcatcagtgatatcggcatctttgaagagagttttactcgtttggttgttaatcttcacaaaatcaccaagctgaaatgtgcctgaccccgcccctgaatgagcgacgcttttgggcgaaatcgcaaatacgtctccaaagcttgccgcggcattatccgtaactgacatgatataaatcggccccacaattgcaggcatttccccacctccgcattgatttacagcatcatatgcaaagagccgataatggtgccctcctattcagctggctttgctttttcttcgagtcgtgaccgctggcgcagcttgatcaaacggacaatattcaggaagaacgccttcactaccgcataaaccggcaccgctaaaatcatgccgagaattccgccgaagcttcccgctccgattaatagcaaaataatcgtaagcggatgggtattcagccgctttccgatcacaagaggagacagcaggtttccgtccagctgctgaacgatgacgaccacaataatcgcaaacagcgctttggccggcgagtccataaaaccgacaatgacagccggcgcggcaccgagaaaaggcccgacatagggaatgatattggtaatcgccatgacaatcccaagaatcagggcatacggcagtccggcaattaaatagccgataaaacacgctgttccgacaaaaagacagattaacagctgcccctggaaatatgccgcaagcgtatcggataaatctttaaaaatctttaagccttctgtccgataagaagccggtagaatttttactgccaaatgcggaaagcggtgtccgtctttcagcatgtaaaaaaggataaatggaacagtaataataacaagcgtgatgtttgtcacgacaccaaacaccgcagataaactggacgtgatattttgcggcaggttttggagaaaacttgtcaatgactgttcaatttttgatatcgatacataatcctggttcatcatccaggtaaaccattgagaatgggacaaatcctttgtcagcgcctgaatctgttttatataatcaggaaggttgttaaacagccctgtcacctgtgaggtgatgataggtccgactgacgctgaaataaaggcaagcaaaccgataaacagtaaatagatcaataggatggataatgtccgcggaatttttttctcaagcaggcggacgaccggattaaatatgaaatacaaaattcccgcaattagcatcgggaaaaacaatgtcgagataaaaacaataaacggctgaaatacaaatgaaacttttgttgctacataaataatcagcaaaacaaataaaatctgcaatgtccaaaaatggacttttgatttcaacaagctttgttcctcctagtttttctttgtctgtcagataaaagaacttataccccatcattgtaacaaaaatgaacccatatcagaactcttaatataatgaaaggagtgttggtgatgaaggccgtgacatacgatacagattcagaactggcttatatctatgttcttcctccgaaaaggaacaggaatatacggtctgaggagcttaaagtcaatgattgtatcctgctggatatcgaccaagacggcaaaattgccggattcgaatgttttggtgaggcagcacacctctgtgccccatttgccgggaaatcccggctatatgtaaaagattcagacggttatcattttcgggtctgccagcatgcttcagtccgttcctgctatacagtgtacggcgtcactttctgtttttcagatggtgactatcaggaatttgccggttttgaccttgacggaacaatgtatcatagtgcgtttttacagcgcttaactgaaaaataggacgtcccggtgtacgcctatttttcatgcgcaagcactgttagacccgctcactgtaatctggggtgacggaaatcatgtgctggattctgatcaaacaaacagaatttcgggctccttcaattgtgatatggtcaggtttaacatcgatcagtctgcctctgaccgtatctcgtactgtctgtataacgaaccttgagccgatgagctttttaatggtctgatagacataaggatcgactaaagagaccagttgcggactaccttggttgaccatatttttatcccctttgtgtgttttatctcagcttatgccgcgcttatggataatgacacaggcttacctgataaaacaaaggggtgcggagattttaggagaatacgtttggaagcggtgtaaaggaagtatcgatgaagcggagacagcgaagaaagctggcgctgttccgtacttatacaggctttatcacggatgcctgggcttggtcgattaattggtccagcttttctattttttttcgtgcggttgaaggatcaatttggcggtaatgatgatggccgcccggctcttcatccagttcgtccgcttttttgacaatctgctgcagtgtgtttttatctaattcgccttcaggcaaataggaatctgtatgaagcaaaatggctagtgcaatctcttttgctgctttcggttcctcgccaagccgaatcagaagtttatgcgcccgttccgcccctttaatggcatgaatgtcatttcttttgtatttctcataatcccactttccgtctgtataccattcataatggccaatgtcatgaagcagtgccgcttttgctgctaaatcaggattaatgtcagccttcacagacagcctgtatgcatgataagcgcaggcaatcgcatgtgccacgccggaacgctgaagatatttttgtgcaattggatgggtgaaaacatccattaatgtaacctttctcatggaaacccctcctttagatatttttagaatcctaacataatttgcagagaaactcaattcttatgtcacatcattttgatcttcttatcatcattgttataccctaaaagcaacgtttcagtcagtatatgcggctgttcaataaaatgcgctggctgtagccttttgtataaaaaaaagagcagaaaatatctgctctacaaaaactctttaatatcataaatgcggccgttttccgtccctttttctagtaaagaaagcagcgtgccggcaataaagtccggactgcgaaggcttcctgtttcatttaatttccggaatcgttcaatgtggtggaaatcctttttcgatgaagaacggatgacggcctgcatctcagtgtccatcactccaggtgagaacgaaatcatgttcactggcagctcttcatcctcctgttcaaatccgaatgtcctcgtaaacatgtcgagcccggcttttgaactgcaatacgcgctccatcccttatatggatttttggcggctcctgaagtaatgttgacaatcgtctttttgccgctgtatgaagcaaaccgttttgtaaacagctgactcaaaagcacgggcgcagtcaggttcagctgataatggcgctgaagctcgtcaagagacgcttcgccggcacgtttgatcggcgttaccattccggcgttattaataagggtaataccagaataacgatctgaatcgatggatgagagcaatgtttcaaattgctgttcagcttcttcgagattgatgaggtctatttgatgctgcgttagtttttcatgagagacatccgttttcgttctggataaggcatggacttcatgccccttttctaaagcctgtaatgcaatggcttgacccagcccttttgacgctccggtgatgatataaagttccattggaaacctccttttccgttattattgtacggcaccgcttttacacaacacaagcacgcggcctacgctttcttgttttcctgcgctgtgacttttgggatgaggaacacgatgcctgcaattccgagcaggatcagtacgacatagatcatcggcagcagcaatgatgatgtttcttgttcatcttctgtttccgttgatgatgtctttgttattggtttatctgcaaatgtaattccaagctgtttcgactgggccgcaatcgtgttggaatcctcggcatttgttgatgtaaacaaatcttttatcagctcggcgtccttgtccttcggtttatcaaaagtgatatccttttgttcctcaggcagttctgttttttcttcatagtaggtatcttcatgcaaataattcgtatcgatttcgatgtcttttttctcatactggtttggcgcgacatctgtattttcttcagtttgggcagcagctgcagagggtatgaaaagggaaaaagagagcatacaaatcatgatccccttttccatgctgcgattacgcttcatacgtttcatcgctttctgctgtgtgttcagccatcagccggataatcagcggcagagccgcggcaatcaccgtaatgatcagcagaactgttattcccattgtaaacaagtgcccagtaccgtactggatgtcgatatatactttcgaaaccggatcttcaaatgtaaagttcggcatgatcaaatcaataagcggtgcgacatagaataggatcattgctgctgaagcaacccagccagggattgatccgaatctgaatgccgtccggatgaaggcagagcttgcgaccagcaatagaatcgtaaacaccgaccacttaatcgtctgatcgtccggcagtgaataaatattcaagccgaacaagctgatcataagtccgacaaggatattcagaattccgaataacgctcctttgacgagaagcggtgcgttttggtaatacgagctgaaatagccgattaacagactgctgatcaacacaatgacaaggatgacaaccggaggtaccgtctgaattttttcttccggaacctctccgctgattttaagcggattcgctaagtaatcatatacatagccattgttttgcccgtctactaatgtatttccgagtatgccgtatacgtcatttcgcacgagtttcgtggaggcgacatttttcccccagttgttgtttaaggtgtcggctttcgcttgaacatcattgacgctttgctgcatgttggttgtgtaatcaatgatgccggactggcgatcagacaatgaacccatcatgtctgacatttgcagcacttcctggccgaccgtatcttggacactcagtgccatggtgccagacagcccatcgttgctgaacgtcgcagattcctgtgttgcgcccgttacaagctgttctgacgcttttgcggcactttcagagattttcgtcagttcgtcgagaacacctgcttgagagtcacggatatagccgctgtagtcgtccgcaaatttggtcatgccgtcgatgaagctgttaatatcctcatctgtttgcatcgtgttgtttttgagagcttcccagctggctgattcttcaggtgtgagagccaggactgatttgacgttgccctgctggccgtcaatagcgccggcttttgcagcactgtcaatcgtaccggataatacagagtcataaacagacaaatatttatagtatctcattaaagcggagatgctttctgtattgatttctcctgaaaattgaagctgatctttattttcaagctcgcgaatcgcactgtaaatcccttcaaactcccgcttccgtttcgcttcgagattttcaagtttaccttcgagctttttcactttgtctttcaggtcatcaatttcatcagtgagaccattcatttgctctgttagttcctctaacttctttttcaactcttcattatgagcagtttctttttccttcagttcttcttcaatttgcttgattcgctcagacgctttgctgagctgttcttttgctttggcgatatcagaaatgtcatcgtttcctggttgctcttggtccccaggctccgtcgtatcttcgccgctaccggtatctcctgaatctccggttccgccttcatttgccagcttgataaattgaagggctgaatcagaagatgcagtctgttcggcagatgtgcccgtttcagtttttccgctgtcggacgcaccatcagaggcatcgccgttctgctcctgaccgtctgttcccttctgctggtcttgatcctgagtactgccgtccgtttgtccgtcattaccggtatcactgctgttattgtcgttccctgtgtcgccctgtgtatcatcgggctttgtactgcccccgtcatcaggtttttctggattatcagtggacggatcgtctggttcagtacccgggtcctccggtgttgggtcctctttttcaggctccttcagattgtctgaaatatcctgaatatcagcagcgatatttttcagttcttcacgctgtttttcaagatcaattttgagttcttcaggatcttcttctttagggtctttatctttatcattgttgtcagaaccatcgtctatgactgggtcgtcccctttcgcaactgtcaatgcctgacgtgccgggacaagcaattcatacacctgatttagtgcagcctgtcttgatgcggcctgatattgttcgattaaattactttggatttttgccatgccaagttcctgctgtgacacttgcccttccctaatttgctgggcgtttgccagcacattactggtttgtccgagctgtgacttcgcttggccgatcccagttgccaatccgctcatgcgttcgctgaactgattcgccttttgctgtgcctggatggcatccagacctgtccggatttgctgctgtgttgaatcctgggctgccaaaagcagctttttctgattttcttgatattccttgtatctttcaactgtatcaatgaattctttcagcgtatttttggcttcctccgctgtagaagctttttcttttgtcgtgccttgcgcttcattcattgatttcttcagctcatcgattaaatctttttgctgtttgatttcacctgctaaatcattagagcttggtttgtaaaagttgtacatgacattctggaattcagattctttattgacgattttgtcaaattctcctctgatgttgtccactttttgcgacacaaagttccagtataaggctgacatttttttgttcattgtcttttgggcatcctcaagctcacgctgaactttttctttgttgaccgcattcaggttatcttgaatgctgaattcaagcgttgctttttgtggatggtctttgtcatagctcaaaatgttttttgagaagtctgagggaatgtagacgatcgcatcgtatttttttgacgcgagaccggtctcagccgcgctacggtttacgaccgtccacgaataatcaggacgttcacccagaacagccgctacttccttgccgaactgggcggatttgtcctcttcatcagactttacctcatcactcaatacgccagtgtcttcattcaccaccgcgatttgccgggtggaattgactgcttttttcgtcgggtcgtctccgataaatcggaaaaacaacaccggcagcagcaaaatgatgatgacggcggatattaacttgatcaagctttttcgttgttctgtcatctagcactctccctttcagcagaacataaaggaatttgaactttttgctccttcccgttttccacaacatatccgaagcccggctgaatctcaggctcctgtctttggtacgggagaggaatgacattttgctcagactttttcatcagcagaatcgcgtggcggatttgcttcatctcagtcgtcaaggagtcatagccttttgagaattcgctgtggtttccgcccgggataaagctgaacccaagatgagcgtatgatttcatgaagttagcgagacgatcttgtattctcgtatcaatcgtctgctggaatctcgttatcccgtcaatcatcagcaccacttgtgagaatcgaagattttgcgcgtctccttggcggacggcttctacatacatggcttctcttgttttgaaaatgtcttctgctgtttcaatccactgctcaatatcttctttcgtttccaaatatgaaacatctgattccttcgcataatgagataagccgcggtcaatcgagtcaaacaggccgatcatttcggtttcatcatcaatcagatgttcgagcatgacttttaggacgtttgttttcccgcgctgagtctggcctaaaatcaggcagtgcttatgcttgcccaaatcaaaatagactgggctgactgtttcttcatgaagcccgatcggtacagataaaggcttgcgttccagcttgaagcggagagaaaattctctcgttgtcaggctctcaggcagcatcggaatcggtgccggctgctccaatgaagcaaatcgtccttgaagtttctgtacgtctgatttcagctcgttgaacatgccgatatcatcatcggcgtcaacaggcaggaacatttgcgcgaaataaagctcttccttttgaatgatgacgcgtcccggaatcggctcaagattgaatttcggacggccgtaaatggaatatccttctgattgatccatgagataatggacaacctttgttttcaagttatttaacaatgactggcggacagcattcacccgcgttgctgtcagcataaagtagatacccaagctttgtccgtctctggaaagctggacaaattccgattcaagctcatgcatctcatccttgactatgtcaaagttgtcaatggtgataaaaatgaatggaagctcttcttcgctcagcgcattgtacattttgatgtggctgatttctttttcccggaacaaacgtttacggcggtcaatttcttctttgatgcgaatcatgaacttttcaattttccttgactggtccatcaggaagtaatccgcggtatgcgggagcttcgctaatggcagcagcgttccgtttccgaaatcaaagatatagacatgaagctcttcaggtgtgtatacgtccgcaaaactcatcaggaacgttgcggctgcaatcgattttccgtagcccgaagagccgaagatgccgatatttccatcttccatcatcttataagcaattggcgcctgtctttgcagatcaggttcatctacatacgcaaagtggaaatggtctttttcgtttgaagggaaaagagtgcgcggaatacgttccgcaagcggcggcagccaagggcttggcagcttctcaattcccatttcatcttggatgcgttcaatttcgtcaactacagcttcgatttcggtttgaacgtcttttttcgcgatatcttcggtatcaacctcagaaagcgggatcagacccgtatctgtaacgatcgcgatttcatcctcggtaccgtagacttcctctaagtaaggcgccccgctccatgcagattggaaaagctcatacacttcattgtttccgacctgcaaatagccgcggcctgttacggtaatgtttgcggcatcgctgtttttcaaaatttctttactgtcggtggcatcctggaccttgagcgctactttaaagcgcgagttactccagatctggtcgtcgatgatgccgcctggcttctgtgtcgccaaaatcaaatgaactccgaggcttcgtccgatacgcgcggcactgacaagctccctgataaaatcaggctcctcgcttttcagctcggcaaactcatcagaaattaagaacaagtgaggcatcgccacttctgctttcccttgcttgtatagctttgtatagtcattgatgtgattgacttgatactggtcaaacaggcgctgcctttttttcagctcgcttttaatggaagcaagcgcacgcatactgaagtttttgcttccttcaatatttgtgatcgtgccgaggaggtggggaatgttgcggaacggctgcgccattcctccgcctttatagtcaattagtaagaaagccgcttcatgcggatgaaaatgcactgcaagtgacaagatgtaggtctggagaaattcacttttccctgatcccgttgtccccgcaagcaagccgtgcggaccgtgtgctttttcgtgaaggttcagatacacaatgtcatctttccctttatagccgatcggcactgacagcgacttcgacgattcacttgtcagccatctttgctgaatgccgatttcttttacttccttcgcatgaaaaagctccaggaacgataccgtttccggaatggaattcgtaatgccgacctggtggttcagcgtccgcagcgtgcgtgagaaccgttcgttgtcctcacgctgatgatgatcgagacggaacggaattcttaccgcttttttcttttgtattaaaatgtcgccttcatgctcattaatgtagcggacaagagttgtaatgttttccgacaagctttcctttgtttccgccgcgacaattgtcgagatgcccagatgctcatgctgtccttctaaatattcgagaatgacatgctcagagatcagctgctgattcgtgatgacaaatacaaaatgcggtttgaactgcagtttttctttgtcatcttcgagatcacgctctctgatcaattcgtaaagtgaagacaagagctgatctcgggtttgctcattataaataaatccttttgcataaatatggggcatttgaaattgcggaagccacttcatccactcccagtctttatactcttcttcatgaaaaataaatacaaaacgcaaatcgtgatagctgttaaagaacgacagctgtccgattagctggtgaatctcatttttcacaatttgcgatttaccgacaagccccatcggaccttctgccaaatcgaccgtcaccggcgcattgcggatatctttatagacgcgctgcatgtgctgcgatttctccatgaggtcatcgatatcacgattcgccaagtctccgccgctcatattgatttcatagcttgacggaactgttcccgtcccaagccgcagctggagataatccttgctttcaagtgatttttcccagatccggtcactgatttcacttgttaagtatttcatttgttcaaatgaaggaaagtgaaattcaagaacctgcttttgcttttcagcaagtgcctgaagctctttccgcttattgtctaagtaaagcttatatacacgctcccgtttttcctcgcgttttttccgctggtttttatcccggaaatattgcactgtcgaggtaatgagagtcatcataaacatcgccaaagaaacgagtataaatatgccgcgcggctggatgatggcaactacgcccatcacgatcagcatcacaagcggaggcaggatgacgagccacagccctctgttggtttgatcgctctcctgagagggaaaactgaaagaaacgcggtcatccggcagatcgtataccatccgcggcgttcttctgtactgcggatattttttctgcatttctgtactcggtttgaccgtttctgttaacgctgtttcaaactgggcataatgaacaatttctaaaaggtcttgttccgtcaccctcatttgcgtgaagttccagaatatctcatcccccggcttgagcggcgtattggcgttgattttctctccgttcaagaagatcgttccgctttcaggtcggaccgaccagctgccgcctgcacgaagcaaagaaaacgtgctttgttctgcaaatgcaaagtcttgcggattcagataaatatctgcattcgttttttctgaggaacatacaatttcatcccggtttcccgtaaaataaacggatttctcaggttcactgcccgtcaatatcaagcgtatatcctgctgatccgtttggagagtaaatgatatatccgcctcaatcgtgccgagacaatcatttcccaggaaaacttcgtattggccgccggattcctttcttttaagagaaatcactccgctattaaatggaatggagctgatcgtaacagaatccttcacatcaggccctatggtcaccggatgagacgacgggaggttagacagatttaatttttgaacgttattttggtaaaaaacccataatagactcaaatggcgaacccccttacggccgaatggcagcatgcgatgacctgcgcttcatgtctcacgttatttgtcatcttttttctcatctttcttttctgtttcttttttctcgtcttcttttttcttctgttcttcttttttcgctttttcctcggctgcggctttttcttctgccgctttctcttctgcttgtttttcttcgtctgtttgtgtctgttcttcgcttgtatcgactaacgatgtttcagaattagactgtttattttcttgacgttctttttgcgctttttcaagctcactatttactgagtcaagttctttttgtatgtcttcatcatttgtatcctcagataaaagctgctgtttatatttagctagggcaaagtaaatataatcattgtattcaagcttacggccgatactgatcgcttctttgtattctcctcgaccataatcaatccaatataagaaatgctgagggtctgattgaagggtgactaaattattttctatatttttggtttttgcactccccaggttttcgacctcaacataggacgtcgccagctgatactgcaccgattcaggcaggctttccgcatcgtacttggacagtgtgctgatgacttcactgtactgcttgtttaagaacgcacggttgctgtccactatcgcttggtgctttggctgcgcgaaaaataaggcgtacatcgaataaataagtgccggtacaagcaaaacaatgagccccaagccgatatatcgctggatgttccacttctttctcgggatatgtatgtatgtttttgctttggcttcgagctcatcaatatgggtttgaatcagctcgagcaaatcatcataggattcagcatctaatatcgcctttgcctctgcggagaacgtcagcgtttcattgaatttcaggtagtcttcaaacgcaaaagcgccgtcaactgccaaagccgctgccgctttcagctcctgccatactctttcctcatcacgctcgtaaggaggaatgctttcttttactccataatggagaaaataaggcgtaagccctttatcgaatacaatgttttcaggagcgacaatcaaattcagcctcgacagattgtgctgctgtacggcttgaacaagctgataggcaaactgccatttactttttttatccttagctttcatgaagcggaatgctttataggaggagggaggttggattgtgatgattacttcatcatccgtcacatcgatttctttatgaaaaaatggatttatatctttgatcacgttagcttcaagaccgtcgagaagctttattttttcccgttgaaaggtaaatgtatagccggcatctgttttctcggcaacagcttctaattggttttctaaatatgatttttgttcacctgacattcaaccagatcctttcataatatttcaagccggtctccgtttgtaatgccgcaatcagacagcttgcattctccggaaaacaccttatccttgttcaccactctgatccagtgcccttcgcgcggaggcatagatacgctttgggcctgccaagcaatatcaattacttttttcaccgggtggtaatctgacaatctgagatcaaagacactgccgttataatgtttcaaatctattgtaatatcaatatacatttaggatcacccttacatagaaagagcgccgtcttcttttgaatcaggcgctccttccctttcatactgttatccgcggatttgatttgcgatgtcttggtcagtagactcaagtgtatttgctgtttgatcaagctgctgattcacatcttgaagcaaatctgacattttgataaatgaaggtttgagctgctcgtattgatctgcgaacgcttcgcttgaagcaccttcccacatgcttttcaaatcagagatcattcggtttaaacgatcaacctgatttaatacttcttggctttcaacgccgtattgcttcgccatcgctcttagctcttcgggtgtgacacgaattaatcctgccatattcctcattacctcctgtgccatcagcctaaatatgggctaattcacttatttttagaacgtcattattataaaaacagtttttcggcatagtcaaacaaatatgttttaattttacaaaatgagtccaatggtttaccccgaatcacttaaaaatgacatatactgtaaagtaaataggtttattttcttaatcttctcttcattctccgaataatccaaaagacccaaataactccccaactcccaaaaaaaacctttcagaaaatttgatgctacagcaccatttctgaaaggttcaattttttctttccttaattagtctcgcctccgatgactttcttagaagattaataggataagctgtcgtattatatgaggcatacaactgtcctgcaaaaaggcgattacaccgccaaatgtatatagaacgtttctctcatgaaattgtttttttgcttctgttctttgttgttgattttcacaaacaacaacaatcataataaaaggaaggggatgagatgtcaaagagaaatcaagcacgaaaagtagggagatttatgaccatgccgaatgatccgtttaaatatagttttgacagacttgaagatgtggctgatcatatcagcgacgttctgcggtgcccgatcaccatagaggatgttaaccacaagctgcttgcctacagtacacacagcgactgcacagaccctgcccggacgtctaccattattggcagaagggtaccggagaaggtgattaacaagctgtggaaagacgggacaattcctgctctcttaaaaacggaccagccgatcagagtcaagcaaatcgatgaagtcgggctgagcaatcgcgtcgctatttcgatttggaaaaacaagcaagtacttggcttcatatgggcgcttgagatccaaaaaacattgtccgatgaagatctgctgacattgcaaatggcagcaaaagcagtgaaaaacaagcttctcaaacttcaaatcagaaaaacgaaaaatgaagaacgcagccaagaatttttctggaaaatgctgaccggacacatccatcaggaggatgatatggcggatgggttccataagcttggaatggccgctccttcagagttttccgttatgatcatccgcataaatggcgagctgactgaaaaaatcgaacagcagctgcaatatttacaggaaacgacccagcaggtttacgtgctgctggcgaccgtagattccaatgaacttattatattaacctcacccaaaacagatcatccttttcaagatttaaaacagtttgctttaagtacgcaaaaacagctgaaggagcggtataaaatagaagacgtttctatcgcttttggcggaatatacaactctatttcttttgtctcccgctcctatcaggaagcattgtccgtcttaaaaacgaaggaacggttcgctgaagagaccaaacattttttcagcttttctgagttaggcatttatcaatacttagatgtcttaaatgaaaaacggaaacaggcgggccattataattactcgctttccaaactggaacaatatgaccgggatcaccagtcaaatatggtagagacgctagagcgctttattgaagcagacagcaacgtgaataccgcttctaagctgttaaatatacacgttaatacgttgaattaccgactcaagcggatcagccagatcgctgaaattgatttgaaaaatgtgaatcaaaaattcaccatctatttagatatcaaacttcggcacatggatttgtgaaatttcacaaatccatgtttttttattttcttaatcaaacaaagaattttccaaaatatcaagctacactaaaaatatcacagatacaggaggagacagatatgatcataggggttcctaaagagataaaaaacaatgaaaaccgtgtcgcattaacacccgggggcgtttctcagctcatttcaaacggtcaccgggtgctggttgaaacaggcgcgggccttggaagcggatttgaaaatgaagcctatgagtcagcaggagcggaaatcattgctgatccgaaacaggtctgggacgccgaaatggtcatgaaggtaaaagaaccgctgccggaagaatatgtttatttccgcaaaggacttgtgctgtttacgtaccttcatttagcagctgagcctgagcttgcacaggccttgaaggataaaggagtaactgccatcgcatatgaaacggtcagtgaaggccgggcattgcctcttctgacaccaatgtctgaggttgcgggcagaatggcggcgcaaatcggcgctcaattcttagaaaagcctaaaggcggaaaaggcattctgcttgccggggtgccgggcgtttctcgcggaaaagtaacgattatcggaggaggcgttgtcgggacaaacgcggcgaaaatggctgtcggcctcggtgcagatgtgacgatcattgacttaaacgcagaccgcttgcgccagcttgatgacatcttcggccatcagattaaaacgttaatttctaatccggtcaatattgctgatgctgtagcggaagcggatctcctcatttgcgcggtattaattccgggtgctaaagctccgactcttgtcactgaggaaatggtaaaacaaatgaaacctggttcagtcattgttgatgtagcgatcgaccaaggcggcatcgtcgaaactgtcgaccatatcacaacacatgatcagccaacatatgaaaaacacggggttgtgcattatgctgtagcgaacatgccaggcgcagtccctcgtacgtcaacaatcgccctgactaacgttactgttccatacgcgctgcaaatcgcgaacaaaggggcagtaaaagcgctcgcagacaatgcggcactgagagcgggtttaaacaccgcaaacggacacgtgacctatgaagctgtagcaagagatctaggctatgagtatgttcctgccgagaaagctttacaggatgaatcatctgtagcgggtgcttaattcacaatgagcttgcagaaagatttctgcaggcttttttattttttaaaaggaaaaaagagaccatttcacgaattatgactatgaagttgatcataaaggaggattcatatggctgttcagcaatatggcgtgttaaaaggcatagtcttagacatgaagcgggaaacagatgatgacagtcctcatttccaagtcaaaatgctcggtgaagagaatacgtattacaggtgcgccatcaatgtgatgtccagttctgaggaatctgaagtattgtatttggctgacgatcagtttgattcgggctcaattaccatccttccgaacatgccgtatggatatacaaggatcaatgaagcaaaccgtgaagtggcactggattatgtgcggggcaatttgtttgacccgcgggaaatgaagcctttgcctcatgaaatcacaggacctgataatgatttaaatgattttattgaaacctatatgaagaaagcacaagatgagaaagcgccggtttatatattcggttcaaaattcggccctgaacaggctgcagataaaatattcggctttaccccgactaacggaatgcacaatatccatatgaatcaagggaatgcaatggatacgcgctggaaaaaagacaacggctcttggcatgacgggggtattctgattcagtttgcagatcagtgggccgctgtgtttttagcgtttttatcccaatcttggtgtaccgatgaaaacggaaacccggtcagagattgtgatcatacccaaacgtctgcgtaagatagaaaaagagactgcggcgagcagtctcttcggaagtttgttgacaaaatcctaaagcgttttaaaagctttaggattttgtcatgttttcagcgtgattgaaaacccttgaactctaggaaagatgagcattggagcggagcgaatgttctaattcgtgagcaccaacgcgcagacttggcaacgaatgcgagggtttatcgacacgctgaagagactgcggctagcagtctctttttgatcagattacacattttcaacagtctttaggctgtttggcctcatatcgctccaatgcgattggatatagtccaaacaagcttcacgccctttttgctcatgaacgactgtccagccgcttggcacatctataaaaccgggccatagggaatattggccttcttcattgatcagcaccaaatatgtgccatccgcattttcaaaaggatttgccattctatttctcctcccttatttattcaactcttccagtttgacagcgagaaccttgccgatttgagccagaggttccggctgacataaatctttatgacggcagtcgatgtcgatttgttcaatctgtctgctaatataaggcttccaagagtcaggttcaatcgggtcaaaccattcaggaatgattgttgatctgaaaaacaaaacatttccatggaaggttttcggcttataggaacctaaaatgccgacagaattgacatacgtattcttcaaatttaaaatgaccgtttcatccaggctcgcaagcgcactgccgtcacggcgaagaatctcaatcgccgcttcaaaatctagcggtttgtcccctaagctgtctggatcgtacccgcctaacgccagaagggcaataagcgcttcctcatcatccggtgcctcttttataggaaggaagtggttcggataggcgtccagcatcaccaacagggatacttcttctccttgattttgcagctgggtagccatcgcttgaacgacattcccgcccagggaccagcccagcagatggtatggaccttttggctggaccgttcggatttgtttaatgtaatcggcagccatgtcatcaagtgttttcggaagctcctcgcgctgcccgattccccgtgcctgcaagccgtagattggataatctgttcctatattggtcatcaaaccggcataacaccagctgagcccccctgccggatgaacacagaataaaggaggcttgtctccacttgttcggagcggcagcagaacgtcaagagcgctttggcttgatcccatttcaagtctttcagcgagcccggctacagtaggtgcttcgaacaagttgccgatgctgagttcaacgccgagcgcttcacgaatgcggctcatgagctgtacagcaagcaaggaatgtccgcctaaatcaaagaaacggtcatcaatgccgacacgcggcaagtgaagcacctccataaagaggtcacagagaatttcttcctgtggcgttctcggtcctcgtcctgtcactgccgctgcgaaatccggagcgggcagtgctttacgatcaagctttccattcggtgtcagcggcaattctttcatcatcacaaaggccgcaggcaccatgtaatccggcagtctctcagcagcatatttgcgcagttccgccgtatcaaatgtttcttccgaagggatgacataagctgccaaccgtttatctcccggctgatcctcacgaacgattactgccgcatcttcaagctgcggatgctgaacaagcgcggcttcaatttctcccaattcaatccggaatccccgaattttcacttgatggtctgcacggccgacatagtcgagagaaccgtcagcgcggaggcgggccacatccccagtgcggtacatccgggtgcctggaggaccgaacggatcagctatgaagcgttcagatgttaaaccaggccggcctagataacctcgtgctaaccccgctcctgatacatacagctctccggcaacacccggcggaaccggctgcaggcgttcatccagcacgtatacaccaagatcgggaatgccgcagccgatcaagctgtttgcccgtaaagctgccatgcttcggtctaattcgatatagctcacatgcaccgtcgtttctgtaataccatacatattgataagctgcggtctattttcagggtggcggttgtaccaatcctctaaacggctgagttcaagcgcttctccgccaaaaatgacatagcgcagactgagtgcctgtccgagatccggctgttcccgttccgcctgcataaactgatagaaagcagacggtgtctggttcagaacggtcacaccctctttgacaagcaggcgcagaaacgcttctggcgatctgctgacgtggtgaggcacgattacaagacgtccgccatgcagcagaggaccccagatctcccacaccgaaaaatcaaacgcataggaatggaacatggtccagatatcatctgagctgaaacggaaccagtgctcggtcgctgcaaataaacgtgttacattttggtgaggaatcatcacaccttttggaacacctgttgagccggatgtataaatgacatacgccgtattcaaaggggaaagcggctgagtcctatccttattttttggattacctgcagggtacgtgtttagtttctctgccagctcgggatcatccagcacgattttcggcacgttttcaactggcggaatgtgatttgcagctttagtgttcgtcatgataaacgcaggctgtgcatcttttagcataaaagcaattcgatcagccggataatccggatcaagagggagataagctgccccggcctttagcaccgccaataggccgacagccatttccaacgatcggggcagtgccaatgccacaaattgctccggcccgacaccttcactaattaggaatcgggcaagccgatttgctctttcattcagctctgcatagctcagtgcctgatcttcatatacaacggcaatagcatcaggacgtaaagcagcctgcttctcaaactgctctggcaaacttgcgtgcggaatcttttcagatacactttgccaatctgtcaccatgctgctgcgttcctctggcgcaagaatatccagatttccgatttgctcgtcaggatcagactcggcagcctccaacagccgcatcaaacggtcagcaagagcctgagcagtttcccgcttgaaaagatcagtgctgtattcaagcagtccttccattccgtttggtgtcccgtcagcaaggcgatcttcactgatttccagcgtcaaatcaaacttggcagaaccgacactgttgattcgcaggctactctccatatcaggaagatgcaattcagcgtccggtgtgttttggaacgcaagcatgatttggaataaaggatgcgtcgcacgcgaacgagccggattgagcacctctacaagtctctcaaacggcagatcctgattgtcataggcggccagattcacttcccgtactctgtctagaagctcacgaaagcttgggtcaccggacgtatcagttctgagcaccaatgtattaatgaacagccctacaagatcgcccagcgcatcatcattccgtccagcgatcggactgccgatcggaatgtcggtgcccgccccgagccttgtcaataaagcggcgagaccggattgaagcaccataaacaggctcaccctatttgcgcgagccagctcctgcaatcgcttatgaagctcgggctcaatacgaaaatgaatcgtatctccatcatgactcggctcagccggacgtgaataatcggttggcagctcaagctgatcaggcaggtttttcaaggtttctttccagaaagcaagctgtccggcaatcaagctatttggatcatcctcgtttccaagcagttcttgctgccaaagcgcatagtctgcatactgcacagcaagaggcgcccattctggagatcgtccgtggcagcgagccgcataagccgtcccaaggtctcgggtcagcggtgttaaggaccagccgtccccgacaatatgatggacgagaagaagcagcacgtactcgtcaggaccgatcacaaaaagctcggcacgaaaagcaggttcagctgcaagatcaaagctgtagcgtacagcttcggcaagccgatcagaaagctccttctcagcaatttcagtaacatgtaactcgggacaggcttgatcagcatctaaaatatgctgataggatgtcccctgtgattcagggaagattgtccgaaggctttcatgacggcagacgaggtcataaagtgccgctttcagcaatccttgatccaactcacctgacaaacggacagcaaccggaatattataagtaggactcggtccttccagacaatgcaggaaccatagccggcgctgggcaaatgagagcgggatcttttcaggccgctcagctctctgcaaagcgggacgtgcactctgcgccaaatcaagatgggcagcgagtccggctactgtcggttcgtcaaagagcttggcgataccaagttcggctcccattacctcgcgaatgcggctcatcagacgggctgcaagaagagaatggcccccaagctcgaagaaactgtcatcgataccgacgcgtgccaaaccgagaacctctgcaaacaagtcacacaatatctcttcctgaggagtccgcggggcccgatcactgacagatgtgctgaagtctggtgccggcagtgctttccggtcaagcttgccattaggtgttaacggcagctcgtccatctccacaaacgccgccggtaccatataatcaggaagactggcccccatataacgacgaagctctgcagtatcaatagcagtatcagcgactacataagccgccaatcgtttgtctcccggctgatcttcccgtacgacaaccgcggcctgttcaatgtgcgggtgattggcaagcacggcatcaatttctccaagttcaattcggaatccgcgaattttgatttgatgatccgcccgcccgatataatccaaagacccatcggcgcgccagcgggcctggtctccggtccgatacatccgagttcccggcggtccgtatggatctgcaacgaagcgctccgccgttaaatcagggcgatggaaataacctctggccaagccggttcctgcaatataaagctctccgacaacgcccggcggcaccggctgcaatccattatcaagcacatacacctgcgtgttccaaatcggtttcccaatcggaggaacgccctgcaacccttcttcaagaaaagctgcggcagaccaaatcgttgtttcagtgggaccgtataagttcgtgactgaacaatgaaggtcttgaagcgcctgcaaaagaccgctcggcagcgcctcgcctcctacaagcactctaagcccccgaagtttctcaggttcactcgttaccaaagcgtgccacagtgtcggtgtcgcctgcatgatgttaatatcgaaattttcaatcatttgagctaatgcctgcggctcacggatcgtttcttttcttgcgatcacaattcgcgctccgctaatcagcggaagatataactccaatgctgaaatatcaaaagcgacagtcgtcacagccaacagcctgtcttcttctcctagagaaaacgcctccttcatggacagcagaaaattgtttaagcttttctgtgtcacaacgactcccttcggtcttcctgttgatcctgaggtatagatgatatacgcaggatggtcaagagaaaccgatacatccggattttccggcgaatagcgttttataatctcctgtgtaacagcctgatcaagcacaagctccggtacagccaggttatcaggcagactggctgctatttcctcagtcgttatgatgcatgaaggtttcgcatcctccagcatgtaagaaatgcggtcggctggaaactccggatcaagtgggagatacgccgcaccagtcttgagcacaccaagcattgagaccaccatctcaggggaacgcggcagcgccaaagcgacaaattgctccggaccaatccctttttcgatcaacagacgcgcgaggcggtttgcctcttcattgagctttcgatagttgacttgaatgtcatcacacatgagagcgatacgttctggcgtaagaactgcctgcttttcgaacatgtcctgaaggctgaccagcttctcggattttgccgtctcattccatttagaaatgactttttctttctcctctggcaacagaagctccatttgcccaatcagcatgtcctctccggcagaagccgtttgcagcagctgcaaaatacgctgctgatgaagcttaatatcagactcactgtatacctcgggattcgcatcaacatcaattcgcagcccgctgccgtctgttctgtcatatacattgattgatagatcatcaacaggaccggctgaaagattatgcgttgtgccccggacgccggcaaagtcgagaccgtaatcaaacggcataagattgatttgagggccaaataatctatgattttctcctatcaatttcagatcgcgccgaagctcttcatggcgatacttatgatgtcgccgaatactgcggatttcccgggaaatttgctgaatcagttcagaaaagctcatcgaagagcttaccgtcagccggagcgggagaaggttcatcaccatagccggtacattcagtgacgcggaccctatccgacccatcatgggcaggccgagcacaacatcctcagagccggtcatacggtgcacataaacagctgacaccgcaatcatgacttcatgccagcttcctgagaaatagcgcgccgcttcttttaacgcgtttacatcagacggaggcagatatgccgtatgacgaagaaaactgttagatgttcttggcgcccgatcagccaagctcacaacttcaggtgcatctgcaaaacggtccagccagaattgacgatccttctcatactgctctgatccgcgataatctgtatcctcctccaaaatggcctggagagacccaaaggaacggcctttagctgtttgtccttttataagcgcagtatatgtacttgccacacgctgggctatcagggaaaaaccgaagccgtcgatcgctatatggtgaatgcgctgataccaaaagaaacgatcaggcccggcaataaacagagcttcattgaacaaagggtcataccctaaatcaaccggctttgctaaatcagctttcatccagtttaatgctgttttttccggatcaggctcagagctgacgtcaatgacgtgcagctgtacatccggagacgggtttatcatctgccaaggcccgtccatattttcaccgaagcggacatgcagcgattccgcttccttgatcacgtgccgcaaagcttcttcaaaaagagcaatattgactggtccattgatttctatatattccgctgtattgtagattggattgtccggatcaagctgctgagcaaaccatatgccagtttgcgccccggtcaaagaatattgaagatcttttgtatcaggcatccgtttgtttaccctccttttataaataatccgcgtttggcagcacttgctggctgcgggttgtgagcaatttttgccattcttcgatcgttgggcgttcagccaattccacgaaagtcacctctgccccttcacggcgccattgttccaccaatgtcatgatccttaccgaatcaagaccacgatcgagcaaatcctcttgatctgtgatgtcttccggtgtttcttgtagaagctcagcaatttgtttacggatattctcacatgtaaacacgttctttttgccagtgtttgctgacgttttttgaacgtctgccggcgcattctgcagctgatcaagaagactgtcagtcatcacggtaaacgcacagcgtccagccgcatagtccagcgccatttgatgtttttctaatgaaaaatcagcaactgcatctcccacaaaaaaggctttaatatcctccataaatgcttcacatgctgtaacaagacagccgatatgggcataaattcctgtaatgatcagctgatcgcgtccctctttgcgcatcatttcaagcagattcgttctcttaaacgcgctgtatctccattttgtcagcacaagatcatcatcctctggtgccagctcggttataattttctcctcataaggaccgctgtttaatcccgggccccaaaagtctgtcagcagcgcacggtcatccggattttggcttcccggctgtgcggtatagacaacaggaatcccaagctgaacacattgattcttcagctttcgtatattcgctgaaagctctattaccggagacgctcccgctgtgaaagcatcgacaaaatagttttgcatatcgtgtattaacaagacagcccgattcggatcaggcacccatgatactttgttttgcggcatatcagatgctgtcggcatttgatacggctgaatggcaggtatagccatatgaacacttcctctcaaattgttgttttatttttttaatcctgcaagaagcttctcggaaatggcttcacggagcgcttttttgctgacttttcctacccctgtctgcggaaaggattcgacaaattcaactcgatcagggattttatatgccgccagtccgcgctctctcaaaaatgctttgagctctgcggcttttggggcttcatcccggggaataatgaacacacaagatctttcgccaagaaattgatcaggcatggagaccattgccgcatcatggacagccggatgcgccagcagatgattttccacctcttcagccgcaaccttttctcctccacggttaatttgatccttcgcccggccttcaacgacaatatacccgtctcgtgtcagcctgacgatatcacccgtacggtaaaaaccgtcctcagtaaatgaagcggcgttatgctcttctgccttatagtaacctcgaattgtatacggtccccgcgtcagcaaatggcctgtttcaccaggttttacgtcgcgatcatgatcatcccaaacacgcacttcatcatatggggacatcggttttccttgggtgttgacaatgatctcctcaggatcatccaatctcgtataattgacgagaccctctgccattccgaacacctgctgcagcgtgcagccgaaaacagcttttaccctgcgcgcggcttcagcactaaacttggcaccgccgacctgcaacacttgaaggctggataaatcgtcacggcgtgaggatgccgcatccatccataccatcgcaagaggcggaacaagagcggttatcgtgaccttttcccgttcaattaaaggaaatgcgtcatctggacttggagaaggagataataccactcttcctccagcgtataatacgccgagaacgccaggtgagctcagcggataattgtgtgccatcggcagcgcggccaagtacaccgtgctgtggtcgagccagcagacctccacactccgcttcaggctgtatatgtagtcatcgtgggtcctcggaatcagtttcgatagcccggtgctcccgccagaaagctggaggaacgccacatctgaagatttgacttcaggcagttttacaggttctgtatgcaaatcctccagcggcaaaaattcctctgcctcacctgcgacaatgatgtttttcaaagtcggcagcttgctttgaacctgtctggcaagcgaacggtagtcaaaaccggaatatgcgtcgggaatgatatatgcagccgcttcagcaaactcgcaaaaatatgtaatttcactgcttcgatgagaaggcagtgcgaagactggaagcgcccccagacggaatagcgcgaaaataacttcaaaaaactctttgatatttggcagctgcaccacaacacgatccttctgttgaatgccgagcttctgaaatccggcagccaggcgatcagcccttgtgtccagctctcgatagctccaatgggtgtttccgcatgtaatggcaatgcgatcaccatatttggctgcccggtcccttaacaaatctccaaacgtctcaccggcccagcagccgttctttcgataggtctcagctaactcatcaggccaaggcgtaaatcctttcagcatgttgtatccctccagcaattcattctgttcatatgtgatccacgcccattgcccgcagcattgtccgaaactttgcggacgtctcctgaagctcgtcctcgggctttgaaccggccacaacaccagctccagcatacaggcggagtgagcgttcttctgcttctgcacaacggatggtcacgatccattctccgtcaccggcatcgtcacaccatccgaccatgccggtaaagaaaccgcggtcaaatggttcaatgctgagaatcgcttctcttgcaagatcagtcggtgttccgcagactgctggcgtcgggtggagagccgctgccaattcaagtgcggttacagacgggtcggaaagctctcccttaatcacgctggacaggtgccacatcgtttccgttttgatcagtgaaggcttctccggaacctccagcgtccggcagaaaggtctcagcgctgccgcaaccgcgtcagcgacaaccgcgtgctcatgaagatcctttgcggaagaaagcaattcagctgcccggcgctggtcttcaacaggatcattactgcgcggccttgagccggctaatgggttggaaacgacctgtgttcccatccttgaaacgagaagctccggacttgctccgagcaatgttcggcggggagacgtttcctcctgactggacacgtctgcggcaaacgtgtagccatgcgagttatgctgagccagatggcgaagcaattcatccgtctgaatcggttcaggcgatgtcaaatgcagcgacctggacagaacgattttgctgagtgttccatcggcaatgcgtgccagcccttgttcaacaccatttttataatcctcaggttcaggaacaggctttatgtgatatgtatgcccagcctgctgttccttttcctcatgatcaaattgaagcggtcctgaccagcgcacttcttcaggtacaacgagccgcgctgcttttacttgatcaaaaggaacggccccgacaacaagcggccggctttgccctgattgttttgcctgacgtaacgcctctgcaattcggccagaaagggtttccatttggttttgcccgtctgcctccggtacgatttcacatatgcctttcgctaacagtacacgatgaggagacgctaagaaaaaggcgcccggctgatattcatgaagcaaatgctccgcttttgtttctgttataacgttttgatccaacattctcatgaacctcctttaaattcagttacacgcctaaggtcgcgccgccatctacgcataaattatgcatcgtaatatgccctgcctggccagaaaccaaaaagagcaccgcatccgcaatatccgaaggcttggctagttttttgagcgggatccctgttttaaatgtctcaagtgatccttttatgacttgctccgctccattctcgtcggcccataatgaccactgcatgtctgtttccgttgatccgggagatacaatgttgcagcgaatattgtattctgcaagctcaaggccaaggcatttcgtaaacatcacagccgcagcctttgaggacgcatatgccgccatagatgttcttggtacaccggcagcattcgatccgactgttacaatcgaacccgatcttcggtccatcatatatttgctgactgaacgcgaggcgttaaatacgccagtcgaattcactgagaacgtcgcctcccattcctcatcgctaagcgaatggatcagtcccgggcgaaggacacccgctacattcactaaaatatcaatcggccccatttcacgttcgatgcgcgccgtgatctcatcaatcgccgcgctgtctctcacatccgcaggaaaagcttctgcatggcggccttctgctttgaggctgctcacaaccttttccagcttttcaggattataatcaaccgccgcaatatgtgcgccttgactagcaagcgtccgcgcaacagcttcgcctattccttgggcagcccctgttataaaagcaatttttccctctatactctttgcattcatatcatcaattcctttcttcgctctaaatgccgaacagacatccagcgaaaaagactgctgcgccttgaaaaacgcaatctattgataatgattatcattatcaattataaaaataatcatatccaaatgtcatgtgacagtcaaatataatttcagtgacaaatatttttttaaaggcaaggctgagtatgtctcagcccattgatagatgcggtccgtcagggtgaagcgcaaaacgcagcgccctgctgaccaaaacaggaagaactgaaatatgtccttctcctgaaaactcgcaaaattctgcccgtatgccttgttcagataaaacggccagccgctcataaagctcccttgcattatcattcatccggcttttatgatgctgctctaattctcctgcggcaagcaggatattgataggctgattgtttttcttggtgagagagacgaaatggtccgttttctcgagaataaacggtttattccaatgaatggacggacttcctgcgatatacgtttgaaacgcatcgggctttgttagcagcacctgcagcacgaaaagccctccgagcgaatggccaaagattgtttgtctttttttatcaatctggtaatctcgttctatctccggttttaaatcctcttcaataaatctgaaaaagccctccgctccgccatgctccggccattctctgccgtcgggcctttccggcagcttcgattgggctgttggcattgtaaaatcccggtggcgtgctgaagagaacggctccgctgtctcatagccaatgccgacgatcactgcagggatcaccccggttttttcgggtcggcgtccctgtattcgaacggcttccgtcatcgttccgaagacagaattggcatccagcagataaatcacaggataaccagtgggtggcggcggcgtactaggtttcgagataaaaatgtgataggtacggttttcattgcgtgaagacatcatacgcacttccgtaccaggaatcgtaaatgcgtttgatgtcccgctatttgtccggtctgttgtttgctctttcatgcagtacgacattcctctccttaaactaaaccgcaatgtatgataatgattttcactatcaactagacacctcaaataataggttttcttccaaagaaagtcaactttttcccgaataaaaaaggcaccttgatcaaataaggtacctgcagactatcaatatggaagtaaaaacctaataaagatgcggattgtcctatttgaaatagaaccttaatcccatgtaaacctttgattttgccaagggtcgcctctcatgtgatagccattccgctcccaaaagccagggtgattttctttcgtaaattggatgccgcgcagccacttggcgcttttccaaaaatatagatgcggaaatacaccccgcagcggaaagccgtgttcaggggttaaaggttcgtcattatgcgcataagccagaagggaagtttccgctaagaaatcatcaagcggcagattggtcgtccagccctcttcagcatgtaaaataacgtagcccgcttcttcttttacacccgctttttccgctatatcacaagcccgcaccccttgccacacattatcaagccttgaccatcccgtgacacaatgaatgtcgttttttgattcataccgtggaaaggctttgacatcttcaaagcttagcagcatcggatggtcaaccaaaccgtatacttgaagattccatttcgtcatatcttcgtaatatgggacatctccggtatgaagcacaggaaatgaagtggtgacgttttgatttggcggcactcttccagattgatcggactgtcttgtttttccgaaatacatatgggcctcctttttgttaacctattttaaaatcatgttgacaatctttttgttctttattactctatgattgtgtatgtcaacctaagggggaacaacgatgaaacaacgtaaacttcgtgcgggagatatggcgctgattggcatgttcgccgcacttatggctgtcggggccaacattacatcagtagcaccctttttacaagtagccggcattccgctttcgatgcagccgtttttctgtctcttggcagctttgcttcttggcagcaaacgagcagcgattgccatgattgtatatgcacttgtgggattggccggagcgcctgtgtttgctcaattttcagcaggcttcgcaccgtttgcagggaaaagcggcgggtttattatctcatacattccggcagcatttgtagcgggatggtttttagaacgaaacattcagccaagtaaaattcgatttctcattgcttcacttatcggaacggcgatcatgtatctcatcggcactacctatatgtatcttgcactgaagctgtggattcatacgccagtgagctacggcacggcttggggctttatgatttggtttatggtaaaagatacagcgctggctgtgatactgtcgtttatcgcaccagcaatctaccgctctattcataaagcaaccggctttaacagaaatcacatatcatctacgtaaaaaccgttctattggacggttttttatcataacgagaaaaggctccccagtaaaggggagcctttttcctataaaacaagcgctgcaatccagccaaagatgacaagcggaatattataaaatataaatgtcggcacacaagtatcccaaatgtggtgatgctggccgtccgcactcaaacctgaagtcggcccaagcgtactgtcactggcaggtgaaccggcatcgccaagcgcagcagcagccccgataatcgcaatcgttgccatcgggctgaatccaagctgcatgcatagaggcacgaaaatggttgtgataacaggaatggtcgcaaaagaagatccgatccccattgtaattaataagccgacaatgagcatcagcaatgcgcccaaggactgactgtgtccgataaaaccagctgacgttttgaccagtgactcgacatctccggttttcgtcaatacgtttgaaaatccggctgcaacaagcatgacaaagccgataaaggccattaaaaccattccatcagtaatcagtgagtccgcttcatcacgcttcatcacaccgctgacaaacagaacaatcagaccagcgagcgcccccataatcattccttctactcccaaagtctgagataagtaaagctggacgccgagtgacacaacaatggctagaaccgcgataccaatgctttttctcgtatatggcgatgcttctgcacctgaaatgtcttttgtttcatattgtttcggtttacggtatacgatcactgataaaataaggccgacaaccatacctgcaactggaataatcagtgcgtacggaatatcagcaagcggaacgtttaacccggcatccgccatattgtccttcagcatgccttggaagatttggccgaaacccaccggaagcaaaatataaggagccgttaagccaaatgtaattacacacgcgatcagacggcggtccatttcaagttcattaaagattttcaaaagcggcggaatcagcaccgggataaacgcgatgtgaaccggaacgacgttttgcgaaaaacaagatacaattaaaataatcagcacaatcagcaccttagaaagtgctttttttcgagaatcttccttatttccgattaatttaacggaggcttccaccattgcgtccggaagacctgttttcgtcaaagcggcggcaaacgcgccaagcatggcatagctgactgcaacggtggcatttccgccgagaccgtctgtaaaagctttaaccgtttcgccaagaccgagcccgcctgttaacccgccggccaaggcgcctataattaatgcgataacaatattgacacgcagcaggcttaatacaagcataagcaggactgcgatgacgactgcattcatgatgatacccctccaaaaatcctttagtttgctaatgtagtagataaataaagtacgaacgtatcgtatcataaccgatccactttagtcaactaaagatttcggaagaaaaaatccctgccgcatcatacagcagggatttttcattactcgtttttatcttcttccaatgtaaatcgctccgcaagtgtagccagtgttcttgccataacgccagtagccccggccggcccgaagcaggttgctttattggcagtcgctgttcctgcaatatcaaggtgaacccaaggtgttgactcagcgaattcaccaagaaacgttcctgccataatcgcatgtccctcgcgtcccggtgaattgttgagatccgccatttggctgcttttcacgcgttttttatccttctctgttatcggcagctgccagattgcctcgccgcactcttgtgcagcatcagctacctgctggtaaaagctttgatcatttgtcattgcaccggttgtttcagttcctaatgccacaacgacgccgccggtaagcgtagctacatcgacaagaactgacgcgccatgctgtttcgcgtatgtaatgccatctgcaagcactagccttccttcagcatccgtattaaggatttctattgtttttccgcttaaagatacgatcacgtcatccggcttcatggccccgccggagatcatattatcggttgatggaataacgcacagcacgttttgctcaggacgaagctctccgatcgtttccatagcaccgagaaccgcagctgctcctcccatatctgatttcatgccgacaattccagatttcgttttaatggagtagccgcctgtgtcaaaggtaattcctttcccgactagtccgacgacgtcctcccattcctttttgccctgatatttcaacacaatcattttcggcggttcggtggagccttggtttaccgcaagtattccgcccataccgagctcttccatctctgatttctccaatatctcacactcaaaatcatatttcgccgcaagctcttcagcatacgaagcgaggtcagtcgctgtcagcatgtttcccggcatattcacaagcgttctagccgaatttgtcccttgtccgtatgcctggccgacgcgaagcccggcctgcacttcctgtgtatcttcatctgttacaacatacacggcttcaatttgtttgtcaggctcatttgatttgtgcttataatcctgcacctcataggaagcaagcaggcagctctcagctaaagcatgagcggcatcggctggaggcacgtcttccgaaataaacgtatcaagcaggacagcagtttcttgttttcgatctttatgaatggcttgaaaaacatgagcaaaacgttccttcgcctgttcaaacgaataattagcttctctccccagaccaacgaaataaatccgtttcatacccgcagaagatggagggaatacttttgatacttgattcggtttcgcagagacatcaccctcttttaaaagctgtgtcagatggccttcgagcatttcatcaatttccaacgcttttcctgtcagctggcttttttgaaaaagcccgaccacaagggtttctgtatgctctgattgttgaaccgcataaaacatgaggcttacactcctaacgtaatgggtatttgtaatgaacaatggtataataggaaaaacattctttccactatacttattttaacaaacaacagtctaagacttgcttttttcttttgaaacacgaaggatttttcaaatagaaaggatgtcgccgatggaacttttaacgaattttcctttattatcaagcctggccgcaattatttttgctcaggtcatcaaagtgcccatacagtttatcgtgtccagaaaactggactggtcgctggtcacaagcacaggcggcatgccgagctctcactccgcagcggtcactgcgctttctacaggcgtagccttggagcatggattagactcctcactctttgcggtttccgccattttcgccgtcataaccatgtttgacgcaactggcgtcagacgccacgccggtgagcaggcaacagtcattaataagcttgttattgattttaaccgtttcgtaaatgaagcgaaggacttccctaaggctgcagagaaagaaaagcaaaaaaagctgaaagagcttctcggacatcagccgatcgaagtctttttcggaggcctaacaggtattttactgacattggtactcgcttactttttcatgtaaaaaaacgctcctgctttcgctggagcgttttattctttcacagttttatattgatttctgaacacttgcaaagattttgtttcattgagcttctcaagctcatcctcggtaatctttcccattccctttttaatcacatatacatcaagggtttttttgccccattcattgtatacatctttgactgtctcaaagtacagatcaaggcggtttcccttaatagctgatcctgtgtcggccacaactccgagaccgtagttcggaatgaataaaattgttccgatcgggaaaacggacgggtcagcagcaaccgtggaatataaatcccgtttcactttcacacctgaatatgtaagcccgtataatggatcaccgggatttttgcccgtcgactcagctcctgctgtgtagcctgttgctgttactctttggactggatattcatcccaatcaaatgcctcttctaacggttttgttttatcctcagccgcggacgtggtttgtgtttgtttctgctgcaatgcttttaatgtcagtcctgcatgcttcaagtgcttttcctgatgttcctgcacccattttgacaagtccttcgcttcaattcctgacactgataaaaatgtcgtgccaaatgcaagcagaaataaacaggtcatcagcaaacgtctgatcatattcaacatcattcacctctcctccgaatcattgttcccaagtggagagagcattattcaaaatggtgaatgagctgaacgcataaaaaaagctttctttagaagaaagcggcatttaaaacatttgatatcctctttttctgagcatgttgatcgctataccggacacgatggcgccggccaaaccgctggctaaaatcagcacatcggcagccgctaatgataagacacgatgaaacagactggcaaaggattctcccggcgactggacatagctgatcagcttttctttgctgataatgaaaaggcatacaatcggataaatcacagccataatccaagacattctcagcagcatgtttaataagaaaccgattccaaaaaacaagacaaaaaacaaaacaattgagatgattacgactggcagactaatcaacctattccaccccctgcgttgtttttagtgtaacgcgggggctgaaataaagtcaacggctggaaaaagaatgactgtcttttcctgtcccctggcaagacggacaagtctctgaaccgccgagaatcaattgaaaatatcctttccctgaacaaaatgggcatgcatgtgaagcggttgtcgttgcagttttcatctaatcatcacccttttttctcaattttctgataatataccatatcaagctgtcaacaataaagtcagatcatgtgacaaatcttttgatgtaagcggaaacatacttgttttcctctcgttctctttttattttggcgttttttaataaagaaaacccgcttccgcgggtttttagaaaaacttgaacttgccttttttcaatgtcagtccgagtccgccaatcataaacagcgagcggttatcaatgacttttttcataaacgaagcgggcgtgcctttcagctttctgccataaacaaccccaaccgcgttatgctcgccaagagaagccactgttcccttaatgtccggcttgaattcctcaagctctccgcctttaataagcctgccaaggtttttagcgaccgttatgccctgctgcattgcaatttgcgcagtaggcggatacggacgctctgtatcttcattcataaacagcgagctgtcgccgagaataaagacattgtcatgtcccggggcgcgaagatcagggttgactttcacccggccgcgcatattttcaaaaccggcttcctccacaatcggatggccgcggacacctgccgcccaaacaacggtttgcgatttgatctgctctggttcctcatcttttttgccgactctgactccttccggggtacattcttgtacagccgtgccgatcttgaactcaactccgttttcctcaagataatgtacggcgtaatcaacaagttccggatcaaagcccggcaaaacggtcggcgctgcttccacacaaatgatgcggacaaggcttctgtcaacgtcatattccttacagagctccggcacgcgagcagccagttcgccaagaaattcaattcccgtaaatccggcaccgccaacaacgatcgttaacctgtccggccgtttttccgcttccgtattgtaagtcgcaaactgcagctcaatatgttcccgcagcaggcgcgacgtgttgatgttggcaatcggaaacgcatattcttttaagcctttaatgccgaacgtttcaggcacggcgccgagcccgatgactaaataatcgtactgcagttctccattcgcaagcacaacttttttctcatcaattttgattgcctttacggtatcctgtacaaaattcacccgtgactggttgattacatcttttatctgataacggcagcggtcatgatggagcgtacccgcgctcgcttcatgcatccatgtcgtttcataatgataattgtgtttatttacaagcgtaatgtcagcatcattcggcccgacatacttcgtcagccttgtcaccgtcatcaatccgccatatcctgcacctaaaatcacgattttgggcttattcaatgccatcacatccaccttctctttttttgcttttgttagacccataataaaatcatcatttgtgttagcttcagcttattggcgggattttatgaaatatattgaaaagttttttgtgaagtccttacccgtagcactattatcatgtttatccggctggcccaagaaacattcagaaaaagatcatttcatttggttattatcgtagcggcctgcggaaatattttcaagaacggatgggcacgttagatccttacgattttttctgctgactcgtcaatttgaacggcaatatggtataattaataacaattttcatttaggaggcaattttcgtatgcgagaggatacaaaggtttatgatattacaattataggcgggggaccggtcggcttattcaccgctttttacggcgggatgagacaggcaagcgtcaaaattatcgaaagcctgcctcagctcggcggacagcttagcgccctataccctgagaagtatatatatgatgtagcgggattcccgaaaatccgtgcgcaagagcttatcaataacttaaaagagcaaatggcgaaattcgaccaaaccatttgtctggagcaagcggttgaatctgttgagaaacaagcggacggcgtgtttaagcttgtaacaaatgaagaaacccactactctaaaacggtcatcatcactgcaggaaacggcgcattcaaaccgagaaagctggaacttgaaaatgccgagcagtatgaaggcaaaaacctccattacttcgttgatgatctgcaaaaattcgccggcagacgcgttgcgatccttggcggtggagattccgcggttgattgggcgcttatgcttgagccaatcgcaaaagaagtatcgatcatacaccgccgcgacaagttccgtgcgcacgagcacagtgtggaaaaccttcatgcgtcgaaggttaatgtcctgacaccattcgtccctgcggagctgatcggcgaagacaaaatcgaacagctagtgcttgaagaagtgaaaggcgaccgcaaagagattttagaaattgatgacttaatcgtcaactacggtttcgtttcatctcttggaccgatcaaaaactggggcctggacatcgagaaaaattccattgtcgtgaaatcaacaatggaaacaaatatcgaaggcttctttgcagcaggtgacatttgtacatacgaaggaaaagtcaacctgattgccagcggcttcggtgaggcaccgacagcagtgaacaacgccaaggcttacatggacccgaaagcccgcgtacagcctcttcattcaacaagtctttttgaaaataaataaaaaaaaggagcttgtgtctgcgacacagctccttttttatttgaagatatttatataattcaatgcagttcctacaaccagcgcaatcacaagggctgcgactacccagatcattgccataataatgcggtcctgaatcttttgggacttcggtgttttttcttcgttttgggccatcttattcgctcctttcctatgtccatgccataaagaaagcctggtgctgaacgaccaagctttgctgaacgtatatcattcgcgttttgatccgctctctaagaccattcgttaaaactatgatacctaaactcaccctgcatgacaagcttcggcacttgcaccacacctgccagcaaatcataatgtttgacatcctaaataaaacagagtacattatagaaggcgaacatttcatatattatacttttaaatattcgtttttaggagtgaaaaccatggaaaacgtatttgattacgaagatattcagctaattcctgcaaaatgcattgtgaatagccgttcagaatgtgatacatccgtacgtttaggcggacgtacatttaaattgcccgtcgtccctgccaatatgcagacgattatagatgagaagctagcgattcaattagccgaaaatggctacttttatgtcatgcaccgatttgagcctgagacacgaattgattttattaaagatatgaacgcacgcgggttattctcttctatcagcgtgggcgtcaaagatgaggagtatgaatttgtccgccagctggcagaagaaaatctgactcctgaatacgtgacaattgacattgctcacgggcactcaaatgctgtcattgaaatgatccagcaccttaaaaaacatttgccggacagctttgttattgctggcaatgtcggaacgccggaagcggtcagagagcttgaaaatgcgggagcggatgccactaaagtcggcatcggaccgggaaaagtatgtattacgaaaatcaaaaccggcttcggcacaggcggctggcaattagcggcgctgcgctggtgtgccaaggctgccagcaaaccgattatcgcggatggcggcatccgcacccatggcgacatcgcaaaatcaatccgattcggcgcaacgatggtcatgatcggttcactatttgccggacacgaagagtcgccaggccaaacgatcgaaaaagacggaaagctttacaaggagtacttcggctcagcctctgaattccaaaaaggcgaaaagaaaaatgtcgaaggcaaaaaaatgcacgtggcgcataaaggctcaatcaaggatacactgattgaaatggagcaggatcttcaatcttctatttcttatgcaggcggaacaaaacttgacgccatccgcaacgtggattatgtgattgtgaagaattccatttttaatggggataagtactaatatgcgaaaagcacccggatttgggtgctttttatgtgtaaaaaaatgttatatggtatattttagtaataaaaaatccttgtttctacattctttcttatcgtatcttagcgtcccccaaaagcttgtccaattaaacttgaaacatcctcctcggccagttcgatttctagtcggtgttaataaatacatgacatcaaattttgaaataagtaactccatttttataatttttccagtagtttcgtaaaacccacctagactccatacctcctattaagaaaaagttatttcattttccaaattatacatttataaacttgtcttcttttccactcgattctttagccatctatatacatttgctatattaatttcaaaaccttttccctctaattttgttagagccactgctcctccaaatacctcttccttatcttcctcttctgatagagcttttgttaccagagaagcttgaagtattgttgaatcaattatcctttgttgttgctcaaccaaagtttgaagttgttcaattgtttgagtttgcaactgcactgttgcatttaaaaatattatctgactcttaaaatgctggacgttagccattaattgctgaatttgaaggtcacttgagaagttcgtatatccaatatcatttaccattgatggtagctgcaaataaatttctaatgcttcttgtataatgtttaaagcttcatctgttgattctggaattactgtaaaaagtacattatttgcttgatgcgtaatttctgtagttgctttaatacctatattctttaagaattccgaaaaataaataagatattgttcacatgcaacacgaacatgttcagggaattcaaagatactagttagagtaccttccctattttttaaaatcaactgatttattgcttctcttgttacattgttagcgatacgtaaatattcttctaaacaattattagaattattattacaaataaactttaaggaataaccatatatatcagattcaatggtaatatccatccgttttgcgacatcattagcttcatatattaattcttctgtactaaaaatatttttccatttttcagtttcccaagaaaaatcaattaatatttcaaacattttatcatcaggtgaaaaaataaaaaatatactttgtttcaaaccagtaatatccaattcagttgggatttctattgttactgattttttatattcatttgcaagttggatcttattaaatggcatactggttatacttgaaacaacttcatttgcaatgacttcaaaaataatctcaattttataagtgaagagtttcaccttttctggttccatgatttgtttattaatttctaaaaaaggctcacccttataatctttaattataatcattatcttctcctcctttcagacttactttcatcgctcctttagcgctctatatatagtcgtttgcttatattatttaaactgtattaagcttattctcccttttattcctactaccgaataagtctaagggcatgttgattttcttttagtatatttcccctgtctttatttgtaaactcctctcttcttaacttcttcaattcatttgggtgcatcatatttaagataattggcataatcctaaaaattcaggagaataagtcgtttacatttcaatctcgtagtgtttgtgaagccaagtaacaaggagctccaattttactctcttaaggtttcctgtctcaagccttttgcatttttacctgccataactacgccaatttcttattccatagttgatttgtaatattaatttttggctgttttcttcctaactcttatttaataagaaaacttctagatatttatgtgattgacattaaatccagaaggattgtaattcacaattcttattatattttgcgcactaaacctcagaattcctcaggcccacctacatttgttgctttcttgaacaaagaatcgcagacgcagacgaccagtttacgatagatgaaaatacgaccatagcaaggtttatatacgatatgcacaagtattggtgttcgctatcctgccgccgaagtattcccctaactttacctaggttacatacactttaaagtacaattttcacaatatgaaatctctatcccgctctttaattctttctaaaaagaaatacttatatatttttcaatgcttttccattattcttgccatttgttttgcatttggattttcttcattttgcaactgttcaatgatgttcatataatccgtttcatttcggttctggcttaatttatatgccgcttgaatgtcttccaccttaatcttaaatccaacgatacctttcaattcacgttctaagagttttggagaaagcttatcccataaaacaggattgtcacgatgtttttcgtatttctccagcatgattgttaattcttctgctaattcatctttctctaacatacttgcttttccatacatgtggacagcctgataattccacgtcggaacattttcgcgcgaataccaggaagaagaaatataagcgtgcggtccctgaaacatcacaagcacatcttcacaggcttcaaacgttctccactgaggatttccataagcgaaatgccccgtaatatagtaatgatcatcttttttattgaatcctaacggcaaatgtgtggcaattggttttccttgttctgttgtgacaaccgtaccaaaggagttttcttgtacaaaattccaaatttcttcagcatttgtgactttaaaatattttggaatatacatcatcatccacccttcgaaaaatattatatgagtgttttagccatgattaaatccgtttgttcttcatcacccatataaaaagagtgggcgccggtctgaacaaaccccattttcttataaaaggcaatagcattttcatttttttcccacacacctagccaaatgttctttttattacgttccagcgcaatttctatcgctttattcagcagatgtttgccaagcccatttttttgaaagctgttctttatataaattctctcgatttcaagtgattcagcacccatttcttcagactgagcatcatcgatattgacctttacatatccagcgatttcatgatcaaagtaaataaaaaagaattgcgaagacatattggataactctttttccagctgctcagtgttaaatgcactttctaaataggctttcatattttcaggtgagttctgttctttaaaagtgtcattgaatgtttcaatactcaattgttgaagtgtttgtaaatcttcccggctgcattttttcatttttacactcattgttcggattcagcccctttatttaaaattcaattgtcttgtgtccctttttaatatatttaaacacggaacagatactgaccttgttaccattccaaaaatcttcttcatcatcaactccctatcgtgattttgttgcaaatgcaataaaatataccccgcattaaatatagcgtaactttgctgtatttacaacaaaaatcaaacaacaaatcagcgtttctcttgccgaagtccccggtactctctgcatcatttccccataataaaaacgcctcccttaacgatgatttatcgctaagaaaagcgtcagtaatagttgctatccgtttttagtgcttagcactcttcaggcttgcctgcattcgttgctgttctgaacgaagaaccgcagccgcatgaagcgatggcgtttggattgtcgatggtgaagccgccgccgagcatggattgtttataatcaatcacggtgccgttcatgatgtcaaggctttctttgtcaactagaacagtgatgccgtgctgatcaaacacactgtctgattcactcttttcatgctcaaagcccatgccgtaagaaagtccgctgcagccgccgcctttgacgcctacacgtagaaacgcgttttcttcttcatgctctttcatcatatcttttatatgcaaagctgctgcttctgtaattgttaccgggttgctcatcattgtgaacctccttttaaaaaccggttgctgtcttttattataaacatgatcgtcccaattctcaaacaaggtgttttacaagaaatagacaccctcacaaacggtttcagccggccctgtcatcattacatggccgttatctttccagtttatcaccaaatccccgcctgctaaatgcaccgtgatgtcttgatttcgctttgatacgccgtttaatacagatgcgactgccgctgcacatgctcctgtcccgcatgcctgagtaatccctgatccccgttcccagacgcggaaatgcaattcttgttcattcacggtttcaacgaattccacattgatgccttccggaaatctcggatctttctcaatcaccggccccagtgtcgttaagggtgcctgttcaatgtctgcgatcggaaaaacgatatgcggatttcccattgaaacggcagtgcctgttagttctacttcaccaaatgccatcgtttcattgattgtgtgctcttccccgccgtcaagcatcgggagctcggattttgtcaagcgcggttcgcccatatcgacagtgaccacattcacttttccgttttcgacttgaacctccgctttcacaagcccggagagagtttcaatcagaaaagatgtttcctcaaccagcttatgctcatatgcgtattttgcgacgcagcgcaggccgttgccgcagtttttcccttcagatccgtcattattaaaaatccgcattttaacaggcgcttggtctgatgggcatatcaggatcattccgtcggatccgatccctgtataaacagaagaaacctgaattgcaatctctgacagtttttcttctggaagctgttcttcaaattgattcacataaatataactgtttcccaggccgtgcattttggtaaatcgaaatgagttcataggtgcctccaactttttttctttttcttagtataaaagctattataagcggacacaatacaattatcccccgtttttcatacataaaagctccttgcactgacgcaaggagcttttatcgtttatataaacatgccggcaatggctgcgctgagcagattggctaatgttcctgcaagaacagccttcaggccgagacgcgcgatatctgaacggcggctgggtgctaatccgcccagcgtaccaagcataatcgcaattgatgaaaaattggcgaatccgcataacgcgaaactgataatggtagcagttttcttagaaaactcgccgatgtgcggaccgaagttagaataagcgacaaactcattcagcaccaatttctggccgatatagcttcccgcctgcaatgcttcatgccaaggcacgccaatcaaaaaggcgataggagaaaacacataaccgagaatggattctaatgttacgccttttaaaccgaacaagccgaaagccccgccgagaataccgtttactacagcgattaacgcaacaaacgcaagcagcatcgccccaacgtttaacgcaatttgcagtcctgttgacgctccctttgcagctgcgtcaatgacattggctgcgccttcgccttcatccattttgaaatcgctttttacggtttgcgttttttccgtttcgggtataatcaatttaccaaagactagtccagctggagcagccataaagctggccgccagcaaatattcaatcggaataccaagaagcgcgtacccaaacaaggtagatcccgcaactgccgatagaccgctcgtcataatcgtaaacaactcagagcgcgtcagcccggcaatcaggggtttgatcactaacggagattctgattgtcctacaaaaatattggcagcagccgccagagattccgttttgcttgttccaaggagcttcgacaatccgccgccaatgacacggaaaacgagctgcatgattttcaaatgatataaaactgcaatcagtgctgagaagaaaatgataacgggcagtacacttaatgcaaaggccggactgtctccgacctttagaagcggtccaaaaataaaactgatgccttcattcgcatagtcaatcagaagctgtacacggcttgaaaaccataaaaaaacagcgcgtcccgcttcccatttcaacacgatgtatccaaacgccacctgtgtgcataaaccaacgatgacggttcttatcttaatattgcttttcttttctgaaaataaaaacgcgatagcaatgatcgcaactgcgcccagcagcccccacagaacattcatgaatactcgtacacctcttaaattttatttaaaaaaatatcttttatacgataacaataatattttttgatgtctacacatttttttagttcttttgtacagcaaaataaaaaagggcctgtccaggcccttttctttaaaacattggattttcttcaataaaggtatatatattctcaacaagctcagcaggcgtttcacccatgacgacttctccgtttaccagagcgaaaagcgattccatgcatgtcccgcagtagcttaagcagccatattcaaggacatcaaggttgggatccttctccaaaatcgcccgggcttcctgagagccgtgagccagattgctgacacaaaattcaatcattggattcatgcggtttcacctcacatatgtccattatcgcgaatttttcactattcgtcaaagacaacggatgattcaaaatttattatcgtaacatattatttctcaaataacgttttactaatttgtgttttcaggctaaattgtaggttattttgaaactattattgtgattttagatcaaattcgatataattctagatgttattttacatagttcgtattttcttcaatgtatctatcatactcttcggattaaaggggaattcaaatgaaaaaattggtcttgatcggcggaggttacgggaacatgcgtgttcttcatcgcttattgccaaaccagctgcctgatgatgtttcaatcacgttaattgacagaaatccttatcactgcttgaaaacagaatattatgcccttgccgcaggcacaatttctgaccatcatatcagagtgtcattcccagagcaccctcgcctggatgtccaatacggtgatatcacatcaattgatattgtacaaaaacaagtgctgttccaagatcgtgaaccgatttcttacgatgacgccgtaatcgggctcggctgtgaggataaatatcacaacgtgccgggagcgcctgaattcacctacagtattcaaaccatcgatcagtcccgcgaaacctaccaaaagctgaataatctgagcgctaatgccaccgtcgccattgtcggagcgggcttaagcggcgttgagcttgcaagtgaattgagagaaagccgtgatgacctgaacattattttgttcgaccgcggtaatctcattttatcaagctttcccgagcgtttaagcaaatatgtgcaaaaatggttcgaagagcacggtgtccgcattattaacagggcaaatatcacaaaagtagaagaaggcgttgtgtataaccacgatgatccgatttctgcagacgccatcgtgtggacagccggcatccagccaaacaaagtcgtcagagacttagatgtggagaaggacgcacaagggcgtattgtattaacgcctcatcacaatcttccaggtgatgaacatctgtacgttgtcggcgattgcgccagccttcctcatgcaccgagcgcccagctggcagaggctcaagcagagcagattgtccaaatcttgcaaaaacgctggaatggagaagccctgcctgaatcaatgccgcagtttaagctgaaaggcgtcctcggttcactcggaaaaaaagccggcttcgggcttgttgctgaccgtccgctgatcggccgtgttccgcgtatgctgaaatccggcttgctgtggatgtataaacaccataacggttaatgatagagaagaaccgctgatcaagtcagcggttttctgtatacccatgcttctccatttcctcataaacgtcttttaattttggattgccttcaccgacaattttgtcttctacgagcacaagcggataaaaatactcgtcatttctgattttttccgcaagctctttcgcatgttcattgtcaggcggctcatgaatatcgatgtactgcatctcaaaaggctgatttggatattttcttttcagcgcagcctcaagccactcgtatgtatccttggctgtcggcatattgacacagctcgcacaaacggtttctgccccgtacacgcttagaatgactggtttcatcacttgtagacgcccccttctcctatgtaagtcctttcttttaagtatacagagccaaagggcgtttttatagaaaaaaaccgtttttgtgttgaagtctgaatgtgctataatagggagagcaactttgcaaaccaaacaatagatttttattgttacactgaatataatggttttatgacgacgaaaggagcgaatgtcatgactgaagttgaaatgaaagaacaggtgcaggaagtactggacaaacttcgtccgtttttacttcgtgacggcggtgactgtgagcttgtagacgtagatgaaggtatcgttaagcttcgtcttctaggcgcatgcggcagctgcccaagttcaacaattacgctgaaagccggaattgagcgcgctcttctagaagaagtgccgggtgtcgttgaagtagaacaagtcttttaataaagcagccaggctgatatttgatcagcctggctttttttattagagatattggtcaaaccatgagctgatataattcaggcgcttgatccgctgtcttgggtgtccggtgcgtgacaaattgtgcgatgcattcggaaaacggacaagcttggtttccttgcccatttttttcagagcgataaacagctgctccgcctgctcgatcggacatcggtcatcccgctcgccatgcagtatcaaaagcggtgtctccacgtttgctgcgtattttaaaggagaccggtcccagagcttttctgtgtcctcaaacatgtcatgctcaagctgccagtctgtaaagaaatagccgatatcactgacgccgtgaaagctgatccaatttgatatcgagcgctgggtaacggcagctttaaagcggttcgtctgcccgacgatccagttggtcataaaacctccgtagcttccgcccgtgacaccgagccgcttaggatcaatatgcggatctcgtttgatagcctcatccacagcctgcatcacatcgtcataatcctttcccccataatctcctctgaccgcattcacaaattcctgcccgtagccgtggcttcctctcggattgatataaacgaccgcgtatcctttcgccgccagcacctgaaactcatgaaaatatgtatgtccgtacatcatatgcggaccgccgtgtatgttaagaataagtggatatgttgtctcaccttccatttgtgcaggcctcatcagccagccgttcaccatcacgccgtcttctgtagcatattgaatctcttcaggtattgatatcgtatgctccctgacaaacttgtcattcgcgccagtcagctgtttctcttcctgtccaagcgggatactgtaaagctcactcggtctgtccggctttgtcacactggcaataaagtgctgttcatcaggtgaaagagaaaagctattgatgtactctttttccagacgaatcggatacacaaggccttcaatcgaaatataatagatgcccgtactgccttgatctgtgccgatgacataaaacccttggctgtcctttgtccaaatcgggcgctgttcagcaccaccgatcaatgaatctccaatcagcgcatccgctaaatgaacgtccagcatctcagtaagacatgtgaggcggccttgttcgatatcatagagccacgcctttgagagcgtagcattcttatattccttttcatttccaagcaaagcaagataccttccgtctggtgaaaatgagcttgatccgaatgagccgcgatgaggtgtaacctgcttaagatctccagactccagtgacattatgtaaacatcatgcggcttgctggcatcatctgtttcagttaaattagctgagaaaacaagccatttgccgtcaggagaaaaagcaggatcaccatgatcagctttgtgacttgtcagctcttccatctcacccgactttacgctgacaagcacaagctgggcatacgcacctctcgtcagccctttgccgtcccgtttgtaggagaggccttgcacttcaacaggttcatagctgtcctgctctgttttttctcggtcatcaatgttttctccctctcccaaactgacagtgaccagaatcgattcgccatccggggaccatattggctttgacacgccatacgggatatcagtcagttttctcgcttctccgccttcagcgctcatcatatacagctgtgccgcatcgccttctcgatcagaaataaaggcaagcgtgcacccgtccggagaccatcttgggtcggtgcttcgcttttctccatgtgtccaaggaacagacccgcccgttttcgtttcatagatccatatatttgatgtatacgaatctttctcttgattcacttgtgattttacatatgcggcacgggtgccgtctggggcgtattgaggatcggtcacagagacaatcgctgtgatgtcgtctgcggttatcagctttttcatattcatctcctcctttttacatgtatttcgtttttctaaataaaaactcctttatctccagcaaaaaaagcgccctctgctgacgctgaggaacgcttggcatgatctatacactttttacttgatataaaggatttcgctctattatacttccctctttcgggacggtcaaagcgtctacttcacaatgagggaaatgaagcgcgagctgttcttttagctcttctccctttcctttttcggtcatgacgagaatcgtcgggcctgctccgctgagagccgttccatatgcgcccttcatctcggcgacgtgctctacttttgacagctcaggcacaagcatcgcccggtacggctgatggaacatatccttcttcatgattttcccgacaagcggccaatccttggacatgatcgcagcaatgagtatattgctgacagcacttgcttttacggcgtcggcatatggaaactccttcggaagcacgtctctcgcgtctcttgtcagcacttcgtaaaaaggaatgacaacgactacgtcaatgtcagcattcgggacgcggatcatttgggtctcgtcatcctcatgcaggccgatcacaagtccgccgacgagagaagcgccagcattgtccgggtgtccttcttctagactggctaaatgcagcttgtccgcttcagacagctttaagccgcataattcatcagccagttcaatggccgctacaatcgccgcggcgctgctgccaaggccgcgtgcaagcgggatgtcgctccacaccttcacatggacaggaggtatttcttttccgtacaaatctgcggtccgtttagccacttgatagatcaggttatctgtacccgccggaattccggcgactgtttctgtttcagcctcaaaagaccatttgtcgctttcaaagacggtcagcttcaaatatctgctgagcgccattccgactgaatcaaagccggggcctaggttagctgtgcttccgggaacagtgacagagaacagcatgtcggcttcgttcatacacgggccgctccttttacatattcaaggatgctgtcttcatcagtcggcaatgtgacaggcttgatttctgaaatgtcgaccgctgtgttcggatctttcagtccgtttcctgttaacacagctacgaccttgctgcctttcggaatttctccggatttcacctgtttcagcactcctgcgatagacgcgcaagaacccggttctgcaaacacgccttctacacgggcgatcagctgatatgcgtgaaggatttcatcatcagtgacttcgtcaattttcccattggattcctcggctgcctttacagctttgtcccagcttgccgggtttccgatacgaatggctgtcgctattgtttcaggattttcaatcacttcattgcgcacgattgccgccgcaccctcagcttcaaagccacgcattttcggaaggcctgtgccgtttttctcatgatattccttgaagcccttccagtacgcagtgatgtttcccgcgtttccgaccgggatcgctaaaacatcaggcgcttcccccagctgttcgcacacttcgaaggcagcagttttttggccttcaatgcggtaagggttgactgagttgacaagggcaatcggtgatttctcacagatggaacggacaattttaagcgcatcgtcaaagtttccgtcaattgcgataatctcggctccgtacatgacagcttgagcgagttttccaaatgcaatttttccgttcgggatgatgacaatgcatttcatgttagcacgggctgcatatgctgccgcagcagcggaagtgttacctgttgacgcgcacataatcgtgtcattgccttcttcttttgcctttgccacagccataaccattccgcgatctttaaatgatcccgtaggattgacgccttccgttttgacatgaagctcaattccgagctgctcagacagcttcggcaggtgaataagaggtgtgtttccttcatgtaaagttagcgccggtgtttgatctgttacaggtaaaaattctttatattgatggataagtcctttccacattagctccaaccgttcccttctacacgatatgtgcttttgacttcttgaacgacttccaaatcatttaggttttgcaggatatcactgaaatcagcttctgatgtatgatgtgtgacaattacgatttcagctaactcatcatggcctttaattggcagctgaaggattttttcaaagctcacgccccgctctgagaacacagatgtaattttcgagaatgaaccaacctcatcttttacatgaattcttaaaaactgctgtgcataaatgtcagacggcgatttcatgtttttctcatattgcggtccgacaaagctgttgccggttacacctaggcgcatatttttcatgacagcgacgaggtcagaaacaacggatgtcgctgtcggcatgcttccggctcccggcccgtagaacatcgtctcaccgacagcctcgccgtatacataaacagcgttaaactcattatgaacagcagaaagcggatggtggtcaggaagcagtgtcggctgtacgctgacctcgattttgctgccgtcacgctgagcaatcccgatcagcttcattgtatagccgaggcgtttgctgaagctgatgtcctcgtctgtaatttgggagatcccctttactttgacgtcttccagatccacgttcatcgagaagccgaggcgcgccaatatcgccattttccgtgcggcgtcaagcccttccacgtcagaagtcggatcagcttcggcaaaaccgagatcctgcgcttccttgagcacttcctcatatgggcttttctctttgatcatttttgttaagataaagtttgttgtgccgttcacaattcccatcatttttgtaattcgatctgatgagaggccttcctctaatgtgcgcagaatcggaatcccgccggcaacactggcttcaaagtagatatcgcatccattttccttcgcttcagcaagcagctcggagccgtacacagccattaagtccttgtttgctgtgacaacatgctttttcgatctcagcgcgtcgaccaaatattgttttgtctgttcaacgccgccgatcacctcgatgacgacatcaacatctggatcatcaatgacatcatacacttctgtcgtgagcacttccttcggcaaatctacttctctctttttctctatatcttttacaagcactttttttatcgtaaccggacagccgacctgatgcataagcttatcctgatggtcttgaataattttaacgacaccgcttccgacggtacctaaacctaaaagccctacacgaatcgctttcaaaaaaactccacctttcttttgattgtcctcttgaaaaagacaattgttaactcaacacagacatataagttacaaacattatataagcccgctcctgttttgacaagacagcattaggctgaattttgcgaatgtaaacgcttaacgcattgatatgacaagattctttattttctaattatttttgtcagattttctcctcaccctgagctgcctttgccgagccagctgacgcgtggaacaaacagcttctgcgcccgcatattcatgaattcctgcgctgtattgagaaattgttcataacgcccacagtcattaagaatgaagacaagctgttcttcaaaataatgcttttctgattctgatgacatgtaatagctttctacgatttcaaaataatgaagcgggaaaagcagacggctgtataaaaggcgtttcgaaaatgaagacagcggtgtgacttgctcgtattcctgtaaaaagagaaagccctgctgattaaaatcttgtctgtgatgcaaaaacgtatgcctcatatattcagccaaatcacgggaagcgtggtcaaacacccaatccgccggaatcctgatcaatgattccggtgaccatgtatgcctttccatccgctgatggcatatcgttcctgaatcagcggcttggggcttgtcatccagctcagtgtccactaaatattgtatcgcgttttctgacagtcctaaataatagggaaatgattcgatcatttttttatcgaatggctcatgcggaggggtctgaacctttctctgccaaaatgcttccagctgatcaattcgttttccccacagatccttccactggccgattcttccggccgccttcacctcatatggatatcctcggccttttcggtgaaattccgcaagctccgctccaatggagaacgccctgtttgaataagggggggccgccttcagcagagcgtacgtttttccctcatgttcaaatgtcagttcaccttcttttgtaaagataaaaaccgaaacgtatgggtcactttgttcttgtaaatactgactcatgtaataaagctccgccagctctgtttctgagaattgggaaacggggacaatcagaaagtatgaattaggcgtctgaaagcattgatatgtgtgctggtacatggaaagctgcctgatgtgaatgccgtatttttcttttattgtacctttcaccatgatcacctgcctgttgaattagggctcatcacatcgtagtcatacacagccggaattatgaatacatattttaatccgaagaaggcgcaagaaaaagtcgtaaacttctcaagcattttgtataaactagtaaaaaagattgggtgaagctgatgtcagaaaacgaacaattcagtcagatggaagctaaagcaagagcacggatgaaggagcgcggcgttgaggtatcagacattgccgagcttgtcttttttctgcagaaaaaatatcatccggatttaaccattgatgaatgcacgctgaacgtcaatcgtgttctcgcaaaacgcgaggtgcaaaacgcgattttaacgggcattgaattggatgttcttgctgagcagaaaaaactgtctgaaccgctgcaaacgatgctggaaatagatgaaagcctatatggagtagatgaagttctggcattttccattgtgaacatttacggatcgatcgggtttacgaactacggttacatcgacaaagaaaaacccggaatccttaaacgattgaatgataaatcaaccggtgaatgccatacctttttagatgacatcgtcggagcgatttccgccgcggcttcaagcagacttgctcaccgcgcgcggcatacagaataagggcacccttttagggcgccctttattcaaatgtatggaatccattcagtcagagagtcaatggcgtgagtcggtttttccatatcgtctgtcatatgttctcttttcgttacgcctgtgtgaacgagcagcgtatccatacccgcgttaatgccggccataatatcagtggcatagttgtcgccgaccatgagtgtttcagacacatctgtgccgagaacgcgcatcgcctgctccataataattgattccggcttgccgataaatacaggctgtacacctgtagatacggttaacaccgatgtcagtgagccgtttcccggcagaaggcctctttcagtcggaatcgcaatatctccgttagtggaaataaagcgggcgccatttctgattgccaggcagccgacagcaaatttttcgtatgtaatggaacggtcgatgccaacaacgacaaagtccgcgttttctccgccaaatgtcaggccgttttcttcaatcgcctggcggattccttcctccccaatcacatacacagacgcgtcttttttctgctgtgcaatgtgctgggcagttgccatgctggtcgtgaagacctgctcttctgttgccggaatatcaaaagacacgagcttgtccgctacctgcttcggtgtgcgcgaagagttgtttgtcacgaaaagataaggaacgccgcgatctttcagcgttctgacaaattcacacgcctcctcgattttttccgtgccattgtacattgttccgtctaaatcaattaaataccctttatatgttttcatatccaacactcctgtggctttccagttgttatttaaacgcggaaacaggtcctagctctgtttccaaatagcttctgatccgtttcgggaagtcctgaagagctgtttgatgcgccttgatcagcctgtaaagctcgccgctgtcagcgagcagatactgttgaaccaacgttttgcggtaggcgatcaattttttgagctcatcaccctctttttccgtgacaactttctcatcaacaagtatatccataatgtcgtcatagctgcccgggtcccgcataataaagccgtcaatcatgtcattgcctgtatccaaaatgcattcgattaacagatggcctatacgctgaagtgccaattccccgatttcagactgccagtctgtttgtgagtcaaatagcgccagctggtgctcgaagaaccctagtgttttctcgattttgcttctgtcaacaaaatacatgacagcatcccctttgtgtatatttattttctgatccgtttcaagacaaaatacgcacagccgaaattgcagtattcgtaaatatattcatctaatgtgctgattttcgtttcgaaggttgccttttgattctggtcgtcaaagaagcccttgagccttaactgaccgtatccccagtctcccacaatataatcgtatttatttaatatatcggagtagcgggctttaaaagcctcttcgttgaagccgtctttgaaattgtgcaccaattcaaattcggcattttgaataagaatcatgatctcacctctttttcactcattcctatcataattcattgccccgtccccatcaattgctaaagaataaatcatgcgatttggctaccctacacatgaggagggattgataaatgaaacgaaccgctgtcagcctctgcctgctaaccggactattatccgggtgcggaggcgcaggattggataatgcccaaaatgtccggaatcagacgcagaatcaaaccaaacccgttcatgtgtcggaccgcaacgaggcttttaacaggcataatgagaacgaacaatttggctatgtccgctatcaaaaagaacaatttgacggagaccagcagaaaacgccggtgatgaaccgggaagaaaccgctcacatgatatcaagtttaacggttcagcttccccatattcaagatgctgcgacattggtgaatgaccgagaagcgcttgtcgtatacaaaaccgattctaaaaaccgggagctgaccgccgatcaggtgaaaaaaacagcggcttccgtgataccgcgatactatcacgtgtatatttccgataatccaaaccatatgcagtccgtcgaaaattacagcaatctcggctctggttcaagggatattagagagatcatgtcggggacgattcaagaaatgaaaacctccccgcaaggaagccctgtctcagagaatgaaaatgccaatggagaaacgcgtcaggacatgaaaatcgataggaatgacaaaaacgccagatgatctggcgttttggcattatgcttgggcttgacgctttttagatgcttcgtttacttgttcatccgcatggtaagaggaacggacaagcggaccggcttcacaatggctgaagcctttttgcatcgcgatttcttttaattctgcaaattcatcaggatggtagtatttttggactttcaagtgtttcttcgtcggctgcagatattggccgattgccataatatccacgttgttcgccaagaggtcgtccattacttcaataatctcttcttttgtttcgccgagcccgatcatgatacttgattttgtcggaatgtcaggctgcatttccttcgcacggcgcaaaaattccaatgaacggtcgtacgtcgcacgcgcacggactcttggcgtcaggcggcgaaccgtttcgatattgtgattcaggatgtctgggcgtgtatccattaaggtttttaggttatcgtagtttccgcccatatcagacggcagcacctcaattgttgtgaacgggctttttctgcggatcgcacggacagtttccgcgaaaatgcctgcccctccatctttctgatcgtcacgcgcaacagccgtaataaccgcgtgcttcagattcataagcgcgactgaatccgctacgcgttccggctcttgcagatcaagctcagttggaaggcctgttttgacagcacagaaacggcatgctcttgtacaaacagaacctaaaatcataaatgtcgctgtacgtctgaccgcccagcattcatgaatattcggacactttgcttcttcgcatacggtatgcaggttgttttcccgcatgagttttttgagccctgtatagttttcatttgtatttaatttaattttaagccattcgggctttctgaggtgttcgtctttctttgccaattcccatcatctccaatatccaatatactcaatttctgacacgaaacattctgaaaacgagaaaggtgcagattttagttctgcaacaaaaataatgtttttctaactaaagaaagtcttttctttagacactttaacataggaaaaatttctcgacaagggaagatgattactgacatttttaagccgggttgccgcaaactatgtgtattcaatatgaaaggagattattttgtgaaagttttgttatccgctcttcttctccttttgtttgcatttgagccttctgcgtctggaaaaaagctttcagatccagtgctgtcgaaacggatggaattatatcataaaatcgaagctgtgacgcagatcccttggtatgcgctcgcggctgttgatcaatacgaagaaaacgtgcggagcaaccggaaagatctgcctgaaaaggcgggaatcatcagcatctatatacccgatgatatctggagcgggcctgaaaacccgaatccgaaagatgatgcgccgttaagcattaaagtgtttgacggaatcggaatggatggcgatggagacgggaaagccgaggtcagcaacgatgaagatattttgtatacgttcagccaatacctactgtcgtatggcacagatgaagacaacatccggatcgggctttggaattattaccggcgtgatcagacagtggggattatatctgaattcatgaagctgtttaaagcctacggccatattgatctgggcgagcatgcattcccgcttccgatcagaaccgattacagctaccgaagcacgtggggagatgcccgcggcttcggtggaaggcggattcatgaaggtacggatatctttgcccattacggccttcctgtcaaatccacatgttacggcgtagttgaaatgaagggctggaaccgcttcggaggatggagaatcggcatcagggacattaacaatacgtatcattattttgcccatctcaatgggtttgccaaagggattaaaacaggacaaatcgttgagcctggccaagtgatcggatcagtcggcagctccggatacggcccgccgggaaccgccgggaagttcccgccgcatttgcactatggcatgtacaaagataacggaagaaccgaatggtcatttgatccatacccgcatttgagggcgtgggagcgatatgaataccaaaaaaagaagtaacaaaaagccgcctcttcaacaggcggcttatttgctgcttttttctttttttgaatcggcaccgtcttctttgctgctcggaagctggacagaaggcgtgacacccgagccgccgcttccattataaaactgcggcacttcgccctgcactgctttaatcgatacaggaacattatttgtgacgacagcggttttgctggcaaatggaatgatgaccttcactttaatttcgacaaagatgctgatatcaataagtgcgttatttatgccatacggcttgattttggttttgacatctgtaaaagcgtcaccgattaaattgaaccggaccgggattttcggcccgaggtttccaagaaggctgttgccggttacctgtcccagcggaatgttgatcataatgttttcactggcgccgctgtgtccggtatgggtttccatctctttcaaatgagcctgaagctgctttgtcacttttgttttcacactgtttacaacctgtgtattaaaatcgattgtcgttaagtttccgttttcatcagaattcatttgaaacatatctttcatattttcactgtcagacatatagtcctcaatcgaatcctggatcacctctgtcgctatacgcttcgtttccatctcgccgatgtccattaaaacaggtttgatcgagccattgatcatccaaaggctgaccgttgttgacaggataaaaaagacaacggacaggagcatcacgtaacggaaaggcaaaggtcctctcttgcgaaaagggccgcgatatcttggcaagaaaatccccccttacatatcacaatgtatgcttgtaagaggggacatagtaatagccggggccaatttattttatttcatcatttttaaaagcgcttctctgccgctcatgccgactttgatgccaagatcttccgcagcgtacgtgacggattctaaaggtgcgtctaacagctggtcaatggtgcggacaccaactgcgcgtcccgccacgatgccgcgctcctttaatttttcattcagcagcgccacatcaagcgcgccgcacataatgtatccgtgatcattggcgacggccataaaattcgttttgggaagctttactgtcacagctgtaaaaggctgtccttctatcatgatcggtgtcaggtttaccacgtcaaccactcccttcattcatcactttatgatgaagggcacagcttgttgtgggctgactgccttattgtgcaagcttccaagcaagcagatcccgcaaaaattccggcataaaatattctttttctgcagcgtcgcgaatcaacggaaacagtttgccgagcgtaaacatatcaagcaccgcaacggagtattgtttatgtttttcaatatcttccccgttcagtgtgatccgagtgacgtgggtgatcccgtcatcgagccgtttcgtttctacctcaacgccggcatacaccattttccccatcacttctccgcggaagccgagtcctttgatccggagctgctccatttgttcggaagcggcatggacaatggtttccttcagttcttctcccgtcaggcggacagccaccgggttgatcggatgcggacagatgcggtgcagatccagctttgtcacaggacctgcttttagcggaccgagaatgacacctgaattgaccatactaatgtccgtctcgcaccattcctttaaggcgtatgctaaaagcaaaggcagctctgattcttcaaaccacttcacctcagcatcttgtgcaagctctgcaacggcatcggacagtttctcctcggcttcacgttctttttcattgagaaacgcttttgtttctgcggattctcctgtccattccgccatgttctgcacagaagccgttttgctaatgatgcttcgctgtacgctgtccaccgtgatttctacacagccgacataatggccgtatttctcggcgctggccagcagtaccccattaaccacttgtccatcttcaagcaaatgatgggtatgtgattcgaggattacatcaatctcaggcaccgcttcagccactgcttgatcatcaagaatgcctaaatgtgacagcagaacgataatatcagcctgccctttcacttccagaatggtttcctttatgctttcaagggcatccgtaactgtccatcccagcttgtcatatacaggataatacggcacagttacacctaagaaagcaatggacataccgtttttcaatgatttgatatggtaaggcaccgcccaggacggacggtttccatttttatcaaacaggttagagacgatgacaggaaattcagcatgatcatataagacagcaagctcttcatgcggaagcgtaatcccttcgttattgccgatcgccgctccatcaatgtgaaggcggtttaagagatcgacattcgcttttccgaatgtcgcctctgtcacgaattgaaaacgatcaagatgatcgccaatatcaaaaacgagcgtctcttcgccgtctgactgatgctcttttcttttctgctcgatataatctacaattttcggccagttttcaaaatggctgtgcaaatcatttgtatgatataagcggagcttctccttcataatatctctccctaatcgttcagctgaaaatgccttcataaatgagctggcagccgatcaaaatcaatacgatccgcatgatcataacgatcgttttcgtctgcatttttctgttgatggcggcgccaagctttccgccgaaccaagcgccgggcacaagcgcgagggcgtacagccaattgacgtgcccggaaatcatatgtgaaacagaccctgtcatagaagacaggaaaataataaacatggacgttgccaccgcaaccttcggcggaaacagaaataacagcatcatcgccggaaccatcagtgatccgccgcctataccgaaaagtccgcctaaaaaaccgacaacaaaggcaatggcaataccgacagaggcctgatatgagtacgtataaggctcaccggcatcatcctgaaatgtccggataattcctttgtgcgctttgttgattggccgggctttcgctttcagcattaaggataatgaaatcagaatcataaaaatgccaaaccaaacggaaaacgagtttgaattgaacagctttgacacgtaagccccgatcatgctgccgggacccgaaccgataaagaaaatgagcccgctcttataatcaactgttttatatttaatataagccaaagttgaagaaaggcccgtaaaaataatgaccaaaagcgaagttccaatcgcaacctgcggcgtcacatcctgaaacagctgcgtcactgtgcttaaaaacatcagagatggcacaatgacaattccgccgccaagcccgatcagacttcctaccgtacctgcgattaatcccaggacgaccaaaatcacaaacgacatcaatcaaaacctcttttctaaaataaatcgagctgtctcggagcaagtccgctgtactcgatatcaagcagttcaagcatctgcttgccattatccgcagcgtcaccgccggaattgttgttgaacaggacaaaaacatccttacattgctgctgcaatttattcaggtgctttttccaatcctccagctcctgttggttgtagcggtataagtacctgacctcccgccagtttttcccgccatcaggcttcatccagccctgcttgttgcgtccgtgaaacctgacgagcgttttgttttcatcggtcgcgcgcaacacggtcggaacgctgccttctccgatttgcggttcatcacagacactgtgaatccagccttccgctttcataaatgaaagcgtctgctcataaaatggcggcgagaaccaggaacggtttctgaattcaagcgcgcaaggaatatctcccatttggtgcttgcaccatctcaaataggcgacattctccttcttgcagtcaaaccacggcggaaattgaaacagcaccatggcgagcttattgctatgtaaatatggcgttaaagacaccttaaacgcatcaaacatctcctcttttgagtcaaagggaatttcgccgcgctgatgccctgtcatgccctgatatgctttcacgataaattggaaggtttcgggcgtttccttcacccacttttcattattgcgcgccggctgaatcgcgtaaaagctcgcgtctaattccacgatcggaaaatgggaggaataggcctgcaattttttctggctggccgttttcggcggatagatgctgtcatgatccccccaccccgtcagtccgatataaatcacactcattcacctctcttccagtttatcacacgtgttttcaggtttcctcggaaatgctgttcatatggcgggaaaatgcagaacgaagatgctgatattgttcctcattcgtatctaaaaacgcctcttctcttgaggaaggaatatgctgatattcaataggcgcctgaaactgctcactcgtaaaatcgtacatcacaccattgatgctgttgtaaaaatgccagctctcaccgacttttgttttgaaaatcgtgccgccgaaatggtcttgaatcaccaatgccgtcacgccgcattggccgcatgacgggcattcttccgtccatttagagctcgaatggcgcgaccaggattgcttaagtatgtatttgacatgctccattgcctccgcctcctttaaaaaaagataccacgttgatgagattttaaaaactagaacggaggaaatcaaaaaacccggcggtaaaatccgccgggcttacgaaggaacgaccagagctccgtcaatttcagtgaccttttccccatcattgtacacgcatcggcctttgctgtaagtggcccaaatgctgcagggaaatgtatgtccttcgtaaatgctttttttatgctttgcaaacatcgattctcttgtaacagtgtacggctccatgctgacgagcacgaaatctgcatcacaccccgcctcaagccgcccttttttctgaaggccgaatcgttttgcaggggccgccgctgtccattctgcgatggtttcaaacggaatctgatgctcaagcgccagttccagcattcctaataaagtgaactgcccgccgctgattccgccccatgataaaaacatgttatcctcccgcttcaaggatggacggcagggggaatggtctgaggaaaccatgtcaatgtccccggcaatgagcgtctcgatcagcgtctcttttgattgcagcgaccggagcggaggcgcgcattttgcgacagagcccctttgccgtaaatcgtcatggctgaacaagacataatgcgggcatgtttcaaccgaaacatcaagaccttcctgtttcgcctctctgatcagccggaccgctttcgccgtgctgatatggacaaaatgaaccggacaacctgtcaccttcgcatactgaatcgtgcgatacaccgcttcaacttctgcttcctccgggcgggaggcggcgtacgcatccgcgtccacctttcctttattggccaaaaccatctgcaagtagcttgtaatcgcgtcactttccgcgtggagagcgaggatttttcctgcagccgcgatttctgccatgcctttgagcaatgtccgttcatcaacagagcggaactcatcagtgcctgactttgataaaaacgctttaaacccgatcgctcccgcttcagccatcggacggatgtcctcgatatggcctggcacaaggccgccccatagcgcaaaatccacggcagatttttgcctgcctagctcagcttttgcgagaagatgctctgccgtcacggttgatggaatacagttgagcggcatatcaaaataggtggtgcaaccgcctgcggccatcatttgagaacctgtttcaaacccctcccaatcctccctgcccggttcattaaaatgaacatggcaatctatcacaccaggaaacacgtatttcccgtctgcctggatgatttccgtcccgcttgcttcaatgtcagaacctatctcggcaatgacaccgttttgaactgcaatatcagcttctataacgccatctggcgtaactgccttcgcaccttttatcaccatatcgtaagccatattgatccccccatgtaaggatgacgatttttcatgtcagtttatgtaacacaaccagttctattttcaacagtttactgctactatgatcgtattacatcagcaaaaccgctagaattcctattgaaaattattcaccttaaccaatgtttttatagaaaaggagaatgcgctatgaatatttttgatgtgatgaaaataccggcttttaaaaacgccaatttaatcgctggaaaagcaggaggggaaagagaggttcagcatgtcaatatgatggacgctccggatatcgcagactttttgcataagaatgaattgctcgtcaccaccgcctatcacctgaaggatcacccgcatcaattatctgaactgattcggcaaatggcaaaacgcggctgcgcgggcctcggcattaaaacaaagcgctatctggaagatatcccgaaggaaatcatcgaactggccgattcatatgcgtttccgatcattgagcttccggaacacatccgactcggcgatattgtgaatgccacactcagccatattctcgatatgcgttctaacgagctgcagcaagctatttacgcgcacaaaaaattcacaaaccacattatgagcggcaaggggctgcaatccctcctcaaaaaggtgtcagacctccttcagcttcccgtgctgctgcttgaccagcatgccaaaatgctgtctgcgtctcatcagatttcagttgagaccgaaaagctgaaaggcaccctgaataccgtatccgggccatttttcacttgtttctctacaatctcagatcagaaaacatattctgtcctgcctatttataatcacgaaaaaaactgcggctacctgctgataccggacatggtgcaggcaggcgacaaaggattgatcctcacgattgaacaagcggccaacgtcatttcctttgaactgctgaaggaaaatgcgctgaagcagttcagccggcgggcccgcaatgagtttttcaacaattttattgagcggaccttttcttcagatgacgaaatcaaaaaccgggcgaaagaattcaagctgcgctgggatcaaaaatacatgtgcatcgccggcaaactcgatcgcaatgacgaatcaatcagctttacagaaaatcagctcgcttccgacagcgtattcgaatttcttgaaggtgaattatcagccttcccgtttccgcctcacttctttatgaaaggaaacgtcggcattattctaatcgaagcgacagacagctggagtgaaatgcacgcctcggtgatcagctttttagaacagttccaaacacaggtcagcgctcaatttaaacgaaccgtgtcctttggcatcagcaatatctgccaaaagctcattgatgttcccgacgctttcacagaagcttctgatgctctgcaatcggggcatttgtcgagaagcaccgcatttatccaggtgtatcacgccaaagatgtgcctgagcttctgcgcttgctcccggttgaggatttgaagaaattttacaactccacgcttcagagcctcgctgaaaaacagcaggaggatcaaagcctgcttcatacgctttccgtctatttagagacacactgccaaatttcagagacggcaaagcgtctgtacgttcatcgcaatacggtcatataccgccttgaaaaatgcgaagagcttctgggtaaaagcttaaaagatcctgaaacaacgatgcgtttgcggcttgccttacgtatgcagcggctgatcagctaatgctcgttacattttcttacaaaacgaatcatttttcgtcactttcagcaatcacacctgtctttttcagctactgtatccaatgacacccctcgatcggcacgatatcatgttactaaagttcacatacagggagggactatagtgaaaaaaagatcgtttaaggtgtttacacttagcctgcagcatgtgctcgccatgtatgcaggtgcgattttggtgcccctgcttgtcggcagggcgctgaatgtaacaactgaacagctgtcctacctattggcgattgacctgttaacatgcggcgtcgctacgcttttgcaaaccttgcgcggaacatacatcggcatcgggcttcccgtcatgcttggcagttcatttgtggccgtcaccccaatgattgcaatcggcagcaattacggcattcacgcgatttatggttccatcattgcggccggtgtgttcatctttttgtttgcgcgttttttcggcaagctgactgtgttatttcctcctgtcgtaacaggtaccgttgtgaccttgatcggcctttcacttgttccgacaggtgtgaaaaatatggctggcggcgaaaaaataaacggcagcgccaaccccgaatacggttcgctcgaaaaccttcttctctctgtcagtgtccttgttctgatcttagtcctcaaccgctttctcaaaggatttgcccgaacactgtccgttctgatcggcatcgccgccggaacagcggcagcagcgatcatgggcaaagtcagcttttcttctgttacagaagcaccgttcttccaaatcccgaagcctttttacttcggagcccctgcgtttgaaatcggtccgatcttaacgatgctgatcgtcggaatcgtcattattgtggaatcaaccggcgttttttacgcaatcggaaagatatgcggcagacctttaactgaaaaagatctcgtcaaaggctatcgagcggaaggaatcgccattctcatcggcgggctgttcaatgcctttccttataatacctttgcgcaaaacgccggcttattgcagctgaccaaagtgaaaacaagaaacatcgtcgttaccgcaggctgtatccttgtctgtctcggactgattccgaagattgccgcccttgcatctgccgttcctgctgctgtacttggcggcgcgaccgtcgtcatgttcggcatggtgattgcctccggcgtcaaaatgctcagcacagcggatctcaaaaatcaataccacctcctgaccatcgcatgctcaatcgcactcggcatcggcgccagcacggcccccgggatttttgctgaattccccgctccgattagaattctggtcagtgacggcaccatcactggcagcctgaccgccatctttttgaatctatttttcagcttgcgcgacaaaaaagaattaacagcacagcaaacagaacttccagtattagaacatacactcgcattagaaaaagaggtgtaaaaaagatgaaggaacagcacaatgccttacagctaatgatgctggggcttcagcacatgcttgccatgtatgcgggagccattctcgttccgttgatcgtcggagcagcgatcgggctgaatgcggggcagctgacgtatttaatcgcgattgatttgtttatgtgcggggcggcaactcttttgcagctctggagaaaccgatatttcggcatcggccttcccgttgtgctcggatgcacgtttaccgcagtcggcccgatgatttccatcggaagcacttacggtgtcccatcgatatatggtgccattatcgccgcaggactgattgtcgtcttagccgcgggcttcttcgggaagcttgtccgtttttttccgcctgtcgtaaccggatcagtcgtcatgatcatcggcatcagcctgattccaacggcaatgaataacctggccggaggtgaaggaagcaaagaattcggctcactcgacaacgtgctactcgggtttggcgtcacagcttttatcttattgctgttttatttctttaaaggctttatccgctccatagcgattttactcggtcttatcgcaggaacagcggctgcatatttcatgggaaaggtcgatttttctgaggttttggaggcgtcttggcttcatgttccgtctctgttttatttcggaccgccaacctttgagctgccggctgttgtcacgatgcttctcgttgcgattgtcagcctcgttgaatcgacaggcgtttattttgcgcttgcggatatcacaaaccgcagactgtcggagaaggatctggaaaagggctaccgggcagaaggccttgcgattttgctgggcggcttatttaacgcgtttccctatacagctttctcgcagaatgtcggcatcgttcagctctcaaagatgaaaagtgtcaacgtcatcgccatcacaggaatcatactggtcgcgatcgggctggttccaaaagcagcggccctgacaacagtgatccccaccccagttctcggcggcgcaatgatcgtcatgttcggcatggtcatttcttacgggatcaaaatgctatccagcgttgaccttgattcgcaaggcaacttgctgattatcgcctcttccgtcagcttggggcttggcgctacaacagttcccgcgttgttttcatctcttccgggcgcggcctctgtcttggcaggaagcggaattgtgatcggcagtttgacggccattgcactgcacgctttttttcaaaccaaacagccgaatggcacagacataaaaacgtaaaggaagatgccaatgttcacaatggatgacctgaaccaaatggatacacaaacactgacagacacacttggctctatttttgaacactcttcatggattgcggagagatccgcagcactacggccgttttcgtccctttctgatcttcaccgcaaaatgactggcattgtaaaagctgcggatcgcgagacacagcttgatttaatcaaaaagcatccccggctcggaacaaagaaaacaatgagcgatgactcggtacgagagcagcagaacgcagggctcggcaaattagaacagcaggaatacgaggagtttctcatgctgaatgaacactattatgatcgcttcggctttccttttattttagcggtgaagggaaagacgaaacaggacattcaccaagccctgctggcaaggcttgagagcgaacgagaaacggagttccagcaggcccttatagaaatttaccgaatcgcccgctttcgtctggctgacatcatcactgaaaaaggagagacgcaaatgaaaagaaccatgtcttatggcaaaggaaatgtatttgcataccgaacgtttttaaaaccgctcactggagtgaagcaaatcccagaatcatcttttgccgggagaagcaattccgttgtcggcgttgatgtgacatgcgaaattggcggagaagccttcctgccatcatttacagacggagacaatactctcgtcgtggcaacggattcaatgaaaaactttatccagcgccatctcgcatcctatgaaggaacgacaaccgaggggttcctacactatgtagctcaccgatttttagatacctattctcatatggacaagatcactctgactggtgaagacattccgtttgaagcaatgcctgcatatgaggagaaagagctcagcacaagccacctcgtcttcagaagatcgcgtaatgaacgaagccgctctgtgctgaaagcagaacgaagcgggaataccataacgattacagagcaatacagcgaaatcatggatcttcagctcgtcaaggtgagcggcaactccttcgtcggcttcatccgggacgaatatacgactctcccggaagacggcaaccgcccgctgtttgtctatttaaacatcagctggcaatatgaaaatacaaatgactcatacgcttctgatccagcacgctacgttgcggctgaacaagtccgcgacttggcgagcaccgtttttcacgagctcgaaaccccttcaatccaaaacctaatctatcatatcggctgcagaatattagcgaggttcccgcagctcactgatgtcagcttccaatctcaaaatcacacgtgggatacggttgtcgaagaaatcccgggctcaaaaggaaaagtctacaccgaaccgcgcccgccatacggtttccaacattttaccgtgacaagagaagacgccgagaaagaaaaacagaaagccgctgaaaaatgtcggagcctgaaagcctgatgggaaaactgacaacccatattttagatttaaccagcggcaaaccagcggcgaacgtaaaaattgaattgaagcggctgggcgaaagtattttgaaagaggtttacactaacaatgacggcagagtcaatgtccctctgctggctggtgaagagctggtttccggagagtatgtgatggaatttcatgcaggagactattttgcgaataaaaacgtgaatacggtcgaccagccgtttttaaccatagtcaccgtccgttttcagctagcagatccagatgcacattatcatatcccgctcttgctgtcgccgtttggttatcaggtgtatagggggagttaagaaggaagcccgcctcaccggcgggcttctatttgcacttcaataaacttttgatcctaggacagtacttgaagtgatccccacacttagtgaaacaacagctagaataaacattcacctatatttttcaggataattgcctacgagaaaaatatcctgtagtcctttcatttataaatcgaggtttcaaactaataagtcagctcttagcagccgagctcccttctccaatcctataaacagaccgcgttttttctcgaaaaaatactctgaagacaattgctgcgtttttaatagttttgataacgcgttctctcttacacctttagacaaaatattcattttttcttttttagacttaaatctatgtcgaaaatgatcgttggcatatcttatactatctccactaaaggaggtgacattatgggattctacaattctggtggatacagtggaaactctggttactcaaacggtttcgggagctccttcgctttgatcgtggtgctattcattttgttgatcattgttggagcagctatctttaattattaagtttaactttccttgcctccgccgtatccaacacctccctgtccgacagacgccataagaagtttttatggcgtctttgctatgtgttcactaatctttttctaatcagctttcaagttctacgagatttatcgtgtgttttcccacaacgcttctgcgtcttgatcgcgctgtctgactgaggctaaaaaagtccggcttttaaaagccggactcccgtctacccccgttcaactctcttctaatcctgcaagctgaccgcataatcccgccgtacccggtacaccggcacaaattccccgccagcccttcttctatatcttcgtcagaaggttgaggggtttcccgaaacagtgctttaagcgcaattatcattcctggggtacagtagccgcattggaagcctccttcttccagaaaagcggtttggcagatatccagttcctcttgttgtacgccctcgattgttgtaatggaatggccgtccacttgataagccatggtcatacacgcattggccagctttccgtcgattaaaatagagcaggctccgcagcggccgattccgcaggacacctttgtcccggtcagctgaaattcctttctaagcaggtcactcagatgtgtcgtaggaacggcagcaacctcccactcctgcccattcacggtcatccggaactgttccttttttacaggaaatggcccggcctcttttacgtccattgcttcagcccctttctgtctatcgcttcaagcagctcttctcttgaaatcggcagcttgtttatccagcatccgaccgcatcatgtactgcctttacaatcgccggagtgatggcgattgttccgatttcgccaacaccgcgcggtccatatacgtctcccttcattaagtcttctattgcaatcaccttcatgtcaggaacatctttgattccgggaatcaaatagtgatcgagattttccgcagcataacggccatccgtcattttcgcttcctccatcagtgtgtagccgagtgccatggcagcgccgccttcaatttgacctcgatatccctgcggactgatgaccggacctgccgcaatagcgtgctcacaatctatcaatttgacatcgcctgttaacagatctacctccacctcaacggcagccgctccaaatgagtagaggaaatggccgcccaccacaggatcaggcgttgttggaaagtcaaatgccgtttcctctgccaaagggcctttttcagccagctccttatacgtcaccacgagcgcctttgtgtttttgtcacgcaagcctgcagcgccgggaataagattttccgctgaacagccgctccattctgccgcccgttttttcaactgagctagaaacggcttcttcaaacgctggatcgcgtgccacaccatgcttgtgccgcgggatgctgtggaggagcctgacttcggcacttttgcggtatccccaataacaatggaaatatcctctgcggcacaacctaactcctccatgacaatctgttcaatcgctgctagaatcccctgtccgcattcttcaaatccaaacgaagcagtgattttgccttcactcgaaagagacaaacggcctcctgccgcatccattcggccataccccagcccgccgccgtgcattgtaattgccgctcccgtgcctctttgcagatacccgcagttccggctgcttcttgtaagaatgggagatttagatatggcattcaacacctgtgccgctccgtcagtcggtgcaatccgatgctcaagaggccccaagtcatgcggttttctgatattttttcttctcagctccagcgggtcgatgccgagcatgccgctgagacgatcgagatgggtttcgagtgcaaatgtgatttggttgccgccaaagccccgaaattcccccgccaccccgttgttcgtaaatactgatattccttcagtccggatattcggaatacggtacggccccgcggcatgctcgacagaaaaatctagaacggcaggcccaagcgtggcgtaagcgcctgtgtccgccacaattttcacgtcgtgcgccaatagatttcccgaatgatctgcacccgtttttatcgtaatcttcatcggatggcgcttaatgccagaacgtacagattcctttcgtgtctgatggattttgacagggcgtccgcttttcagggccaaaagcgcagcatacggctgaatattcagctcatccttccctccgaacgagccgcccatcggacttgacacaattctgatcttctcttcaggaatatcaaaaatacgggcaagctggaaacggtctttatagccgtgctgggttcctgcatacatcgtaaaacccccgtcgtcttccggaacggctacgcctccctccgtttccatatacgtatgcatctgccgcggcagctcataggtttcttcaaggactgtgtcagatgcttgaaacccttcttccacatcgccgtttgaaaaaaatgcgcggtggaggatattcccgtcctcatgcagtctttgcgcattcggccgaagcgctttttctggtgaatccatgacttccagctctttatactcaactcgaatcagctccagcgccgcttccgcgatttcttctgtttccgcagcaactgcggcgatcgcatccccgacataccgcaccctgtcctcacataaaaccggctgatcagggatgacaatgccaaatcggtttaagccgggaacgtctttatgtgtgacgacggcctgcacgccttccattttctcagcttttatggtgcaaaccgacacaatctctgcatgaggataagcacttctcagcaccttgccatacagcattcccggaaagctgagatcggtcatatatttcaattcccctgtgaccttatcccttccatccggcctgactcttgacggtttgttgatgatcatttattcccctccctcagccatcagctctgccatgatgacgttggcagcggctttttttctgtatgccgctgacataaaagcatctgaggaaaacggcagctcatggataagtgttttgtacagctcatgcgagtcccaccctggtgccatccatttcgcttcgctgtccaataatctcctaggagtgatatcggcatggccagcggcgaggcgaatgccgccgtctttcaaaaaacgtccagctgcaacagcaaccgctcctgtaaaagcctgacgccttccaagcttgtgataaaatacacgctctccctccgcccgcgggatgatgacacgcgtgacgatagccgttctaaagtcttcctcaatgagccaagcgccaagcggcagcctgattagcttcttttgatatacgataagatcagcatcaagcacaagcagaagcggaatgaaatcaccgattttactcgctatgttgccgccaatcgtggcacggctgcggattcccggtgcggcgacagcggaagcagcgtcactgaaacagccaagcgtgctcttgatcaaagggttctttctgcattcactcagtgatgtgagcgccccgatcgacacgtgggtgtcactggcgctgatccctcgcatctcgtcaatcccttcaaggctgacaaggtgctgtttcggtagagttcctttgtcccactgaagctgaagcagcgtgcttcccgatgcggcacacacatccggagcaagcttctctaaaagcgaataggcctcatcaagcgctgccggcctccataattgaatattcatccttgcttttgtcacttggccgttcaagccatcgccctccttaccatgtcatattcctcgggtgtatcaatatcgtccaactcgccgctatcctttgcctccaaaaccgctcctgctccaagctgtccgcttttcaggagcctgcgagccccttcatctcccgttaacccctttacataaggaaaacaagccgacgagaagtagattggcggggtgaacgcccctaaaaacgatgacacggcaaatggctcaggggccagtgccacaagggcattgagatgatcgacggaaagctgaggctggtcggctaacaaaatgacaacgccgtccgcccccatgctttctgcttttctcaccccgctgctgactgaatgcccctgacccttttctgcgtcttggcaaacgtgcaggctccagcgtttttgaaaaggcggagcgtgatacggcgctcctatccactcaagggaggcatgttctgtccgctcgacgaccagcacgtgatcaaggcgggacgacagagcagttttcaaggaaagtgagccgatgttttctccttttagcggcaaagccagcttgttttgacccattcttctgcttttgccggcagcgagaaacacgccgatcagataggggcttctcatacaaccgctattcgttttcttgtttgaatgatttctgcaactacacttaccgcaatttcctctggaccttccgcaccgattttcagcccgaccggactgtaaaagtgagacggaggatgttttccgttcagcagccgtttcgtgcggtttgccgaacccaacagtccaatataatggaggttttgagaaaataagaagttgatgatcgtttgatcgtgctgataatgatgggttgccacaacagctgcatcatgcggaaaaaattgaaatttgctaagcattcgttccggaaaagcggtgatcagctgatccgcttttggaaaaagagaggatgtacaataagcgggccgccaatccgtcacgataacagaaaaccctgtgtcagccgccaaattggccagcggtacagtatccggtcccgccccaaacagaatgaggcgcggcttcggttcaattcgctgaataaacatgttagtgggtggatcgaaatgcggtaaatgaagcgttgaaacagtacgttgaatatcttgcagaggcgcgtccggccagttgccaaaatgcccgttctccgtcagaaataaataatgggaggattcaatctttataacagaagtgacagctttgcctgaatgaaggcaatccctcactttctcatagtgccgccttttttcctgagtgattcgctctgcatgaacatgaataatgccattgcacccggctcccatgccccaagaaagatcgtcctccgaccgcatgtcgtagggaatcagcgttgatgtgagctgatcgcccagcgcactgattctttggaatacatcttcttccacacacccgccgctcagcaagccaatccgtctgccttttttcttaaagagcatagaggcgcctgcttttcgatacgcggagccttcaacttgaacaattgtcgccagtacagcctcctcctggtcttccaggagcgcatctaacatcgtgtgaaaattccccaatgccgcatcctcctctcgaaaattgccgtgagaaacaactagttcagcgtgattttataggtaacttgtataaagaatagacgatggaagaaaaaatgactcatgatttgtcagaaaatgaaacacatagaaagaggatttgtaaaaagagtcaaacgaagaaaatcagattggagaaaacacgaaatcatatctaaaaagcttgcggagttccgcaagcttttctttacaccgctgcctggcggccagcgttttcatacacatccagcgctgcttggagcgcttttcctgcttcgattcctgcgttatgtctgagaagcacagcctctaacccggcaagcacgaatagcacgttttcttttctgcagctgtaccccatcgtgccgattctccagatcttccctgcgagcgggccgaatgagctggcgatttcaataccgaattgtgccagcagcatgccacggacagactcgccgtcaatgccgccgggaatttcgacacaggtgacaacaggcattttgcagctgtcatctccaaacaatcttagccccattgcctttatccctgctgctaatgcggcttcatggtgccgatgccgctcaaaacgcgcctcaaggccttcttcaagcaccagtctgactccctcacgtaaggcgtacagcatcgtcgtcgcttctgtatgatgattgagccgtctttcgctccaataatcctcaagctggctcaaatcaaagtagttgcttgtgattggccgatttcccgaaagcgcttccctgtcagcttgtgacgcaatcccccgctccacctttttacgagctgcaatcacgtccgccacccgctcattatatgtaatcggcgccattcctgagggcacagacaaacacttttgcgttccgccgatggcagcatcaatcttccattcatcgactttaacctcgcagcccccaatcgttgcgactgcatcgacgataaacaatgcatcctcggtgcggcaggcttcgccgatggctttcagcgggtgaatccgtcctgtcgatgtttctccatgcaccatggccacaattttcggcttcactttttttatctcccgtatgatgtcctccgggtcaaaaaccgttccccattcgcactcaagcatatgaacatttgccccatatcgctcggcgatttcagtcagcaaataaccgaaacggccgtaaatgggaatgagcacatcatcttccggctctatgacactagccagcactgcttcaattcccgcccgtgaagtgccgtcaatcgggtatgcccagcggttttttgtttggaacagctcccgaagcatctccatcgtttcattcataatacctgtaaacgccggatcaaattggccgacaaccggggtgctcattactcttaatacacgcggatcaacctcaacaggccccggcgtcataatcgttcttaacggggtgcataattctcttctgcctgacacagccattcctcctttatcagtaagccagtttgtataataaatcagtcagtgcgcggacgccgatctcaagctgtctggctgacgtatattccttcggtgagtggctgacgccgcctcggctcggcacaaacagcatacaagcaggatagcgccttccgatcatttgcgcgtcatgccctgctccgctcaccatttcctcacagctgaagtcgttttctaatgctgtttcaaaagccgcagccttcagcctttcgtccatcggcacaggctctatccgcatatattcatcaatcacagcgcgaattcctttttgtaggcaaatgccgttgatcaaagcaatcatgtcttgatgaaactgttccagcacatgctgatgctgatggcgaatatcgattgaaaactggacgcggcccggtatgacattggctacattgggctctgccgttatttttccgcatgtcagacggagctcatccggcagctcctccgaccgcagtaacagctcatgaatgatacggctgctggctgcgagcgggtccttgcgccatttcatggaggtggttcccgcatgattgcattcaccctccagcgtgacgagatagcgcctctgccccgcaatgcttttcacaatcccgagatcccgtcctgacatttccaatgtctgtccctgttcaatatggagctcaacaaaagcgctgatatctgtccgatatgctgcctgaaacacacctttgccaaaaccgttctcatgcatcgcatgttgcagcgagactcctgattcgtctcttggctctgctccatcctgtaatgaaaaaacacccgtcatattccctgatccccaataggtcattggaaaacggctgccctcctcctcacataaggataccgcttcgagtgtttttttcggcgctccatatgtctctttgagccgctttatcgcaagcattgctgccagaacaccataggcgccgtcgtattttcccccattgatgacagtatcgatatgtgaaccggttataatgacttcatccggagactgggtgcccgaaagccttccaaacaaattgccgacatcgtcgaatcttgtgtcaagcccgaaagaagacatttccgttttcacagcaagctgtgcgtccatccactcttttgtgtataaaagcctcgttacgccgccatccgcagacgcaccgtattgggcgagccattcaatataatctgtgatgctgttttttactgaaagcttctgcttttccatgtactcccccctctggccgctatggtgacttcattatagaaggaggaacatgatagttcattgacagattaaccaaaaaaacgtttattttttagtcacagtatctatccagcaaccagattcaccctacatgtcacaactattttgatgtaaaggtcaaaaggaaacacggtaaggaagagagccagcaagagcgaaagagagggtcaagctcagcttgccagagaggcgatgtttgcggaacggatgaaaacggaaatgccggcagctcgcaaaaacaggacctaaagatatgggaacaggagatttccgcctcctccaaagggactaatttacaattttaatgaaaaatatacaaaatgacacttctatcctttatttcaattttagataatagacatgatctgataaaaggagggcaagtgatgacaaaaaaatcatggtttctgccgctcgtctgtgtattactgatttccggatggcttgcgccggcagcttcagcaagcgcgcaaaccgaattaagcctcaatgaccgattggcgtcttcccctgcaggaacaggaagccttctctcattagccgcccccgctgcaccctatgctgacacagatacctattatgaaggggctgaaggtaaaacaggagactcgctaaaaagcaccctgcaccgtattattagcggacacacgatgctatcctacagcgaagtgtggaacgcgctgaaagaaacggatgaagatccgagaaatccgaataacgtcatcctgctctatacgaatgaatcgcggtccaaaaacctgaacggcggcaatgtcggcgattggaaccgcgagcatgtctgggcgaaatcccatggcgattttggtacgagcaagggacctggtactgatattcatcatttgcgcccggctgatgttcaagttaacagcgcaagaggaaatatggattttgacaatggcggcactgaatatgcgaaggcacccggaaattattatgacggcgattcatgggagccccgcgatgatgtgaaaggcgatgttgcccgcatgctgttttacatggctgtccgttacgagggtgatgacggctatcctgatcttgagcttaatgataagacaggcaacggctcagctccttatcatggcaaacaatctgtcctgctcgaatggaataagcaggatccggttgacgaccgcgagcggaaaagaaatgaaatcatttatgaaaaatatcagcacaaccgcaatccatttatcgaccaccctgaatgggcggatgagatttggccgtaagaaaaaggtgctccttttgaggagcacctttttctaatacacagcctcttccgtttccgcatcgaaaaagacgacgtggtccattttcactgagagctggattgaatcgcctgcatcgattcgcgtgtttccgtccaggcggaccttgagccgctcgtccccagccatgacatgtactatgagctccgagcccagattttcattcacttccacgttcgcttgaaacactgaatcaaacaactggtcatttcctgtcatttgtgtgatgtgctccggccgtacaccggcaatcatctgttctccggcatatcccttttccttcagccgctttgctttttcttcaggaatatgaagccggatcgaagaatttgtgaaaaacagctcgccatgctgctgttctatgatgcctttcaaaaagttcattccgggagagccaatgaagcctgcgacaaacaaattggccgggtaatgataaatgtcatgaggtttcgccacttgctgaatttccccttcattcatgacgacaatccgatctcccattgtcattgcttcggtctggtcatgcgtgacataaatgatcgttgcctctaatcgctggtgcagcttgctgatttctgtccgcatcgtcactcttagttttgcatccagattagaaagcggctcgtccattaaaaagaccttcggctccctcacaatcgacctgccaagcgccaccctttgccgctgcccgccggagagcgccttcggttttctcttcagcaaatgttcaatttctaaaattctggctgccgcatgaacccgctcggcaatttcctgtttcgccatctttctgagctttaatccaaacgccatattatcaaaaaccgtcatatgcggataaagcgcatagttttggaataccatcgcaatatcacgttctttcggcggaagatcattgacccgctccccatcaataagaagatttccttcagaaatgctttctaatccagccaccatccgcagcgttgttgattttccgcatcctgacggccccaccagcaccaaaagctccttatcctttacatctaaatcaaagtccttcacggttaattgtgagtgatatgattttttgacgtgttcaaatgttaatgaagccatcagaaaagtccccctatcttttgacccgttatttcgtcactggaaacaacttggtctttctgttatttttagagtaatcgattcccatttttgctatatttctaaaataaaaaatgtaaatttgtattataacgtcataatacattataatataaataataggttaaaaggaggctaccctttgttaaacaacggaagttctacacctttatacattcagctaaaacaaatcatcactgatgacatcaaaaagggcgtgtattccccaactgccaagctgcctaccgaaaacgagctttgcaccaagtataacgtcagccgcatcaccgtcaggaaagccattctcgatttagtcgaagaaggctatctgatcaggcagcagggaaagggaacgttcgttaaaagccctaaattaaaacgagagctgatcgctgtaaacggctactcggaatttatggaatcaaccggcaaaaaaccgaagcatcatgtgctgtcccatgacatcattccagcgtcaaaacccatcgccgaaaagcttcaaatccaacccgagagccctgtggttgaattaaaacggattttatataatgatgatcagcctctcacctttgaagtgacgcattatccgcttgatttgtttcccggcattgatacctttattgctgacggcgtatccatgcatgatattttgaaacagcaatacaaagttgtacccacgcacaatacgaagctattaaacgttgtatatgcccaacaggaggaaagcaaatacctggattgtgatatcggggatgcgctgtttgaaattgataaaacggcttttacatcaaacgaccagccaatctattgctcattgtttttgatgcacacaaaccgtgtcacttttaccatcaacagcccctacacataacaggcataaaaaacgagacactgcttatagtattctcgttttttcactgcttcccccgtcctccaagcgataaggatagccatagccgaaagctccgtacacaccgcatgttttcgcagccgtttcggcggcctggcgcaaagcgtacgttatatcctgcttcacgcaaaaggcagtcaaaaagcctgctataaaagaatctcccgctccaagtgtatctattatatcagcttccacaatcggctgatgatagactcgatcacccgcagacaggattgctccttggccccctcgggtcatacaaaccattttggctccgtacccatgagctgttttggcaagctcaccgcattccgactcactcaaatcgcttcctgaaaaaaacgcatacgtcacataaggacagaccctcctcaaataatcatcctcccgattggttgaaaaatcaaatgagacagggaccagcccgcacagctgcggaagatcgttctcaagcctgctgtacacgctcgtatgcagcagatcatgcccgctgataaaagatacatctttctcctgaaacgcgaggcgaagccgggactgaatgccgcctttatttgatctgacaaaaatgcggtccccctgttcatcaagggtgacaatcgccatcccgttttctccgtgcgcctggcggatataatctgcattgacctgctccagcttgagaacgttcaacagatgcgccgcggcttcgtcattgccgacgattccaatataggaagactcatgcccgagccgcttggcaagcacagcaacgtttaaggcatttcctcccgggtaaaatgtttcttgatcctggtagtaatctacaacattatctccaaccgcaatcaatttcatagcgcttcctcctttatccttttacactgccgcttgcaatcccgcggacaaaatatttctgcatcaataaaaatagaataataatcggcgcggctgaaatcgttaaccccgccagcaggacgccccagtctgtctgcagcgcgtctctgaactgcatcagcccggctggaatggtccgtaaattctcatcatctatgaaaataatcgcaaacataaactcattccatgtatggtaagccgtcaaaatgccggatgtcaccaaaatcggcacgctcattggtaagaaaattctgaaaaatactccaaaacttgtacacccatccaaataggccgcctcctccaattcttttgaaatagaaagaaaataagagcggatcaaaatgatggtgaatgggatccgataagccgcatacggcaggattaacgcccaatacgtattgtacaggccaagcgactgaataatagaataaagcggcacaagactgacctgcggcgtcagcatcaatccgccgagacatagcaccaagaagaatccttttcctttaaactcaaaccgggaaaggccatacgctgcccatgcactgataaagacagtgatcacacacgtcagcgccgtaacgatgacactgttcataaaataagaagaaatcccctggttccaggcggaaacaaaattttccggatgccacgatgacggcagcgaccagctgtgctcaaaaatatcgtcagagtttttaaaggcgctcatcaccatccagagaagcggataggcaatcgcaatcagataaagaaacagaaaaacccacacagacgtttctccgatataccattttcgtctaggcttatctttaacctcaatgtgctggtcaggcacaggctccaacctgaacgaatctgtcttcttctgaggcagcatcagttactcctcctttccggttttaaagaacttcatttgcatgagcgataatgcaagcgtaatgattaacacgacagtggcaatcgctgaggcgtagcccatcatatcctttgtaaaggcgcttttatataaaaacgtgctcaagacttctgacgcgtttcccggcccgccgcctgtcaaaatgtacggctcattaaagaccgtaaaggccccggtcagcgtcatgaccaccgcaacaaaagacatctctttcgtctggggaacagtaatatgaaaaaactgctgaattttacccgcgccgtcaagccgggccgcttcatacagttcatccggtattttttgaatcgacacaatgtacagcatcgcaatataaccgacagattgccactgggacacaaaaatgacagaaagcatagctgtgctgtcatccccgagccaggccctcgtcagctgatcaagaccgatggcctgaagcagctgattcaaaagccctgtctccggattgtaaataaaatcaaacaaaagcgcgatcacagtcattgagatgacaaccggcaaaaagaaaacggtacgaaaaaacggcgaccattttctgaccagcttatcctcaagcaccgccgccaaaatcaaaccgccaaatacctggcatacaattgagatcactgcataaagcacattattggtaagtgcctgatagaagacaggatcatgaaataattcaacatagttttttaagccgataaacgttttttccggagaaaatgagctccactgaaacaggctgaggaatacattctcaaaaatcgggatataaacgaaaagtaaaaaaacgagagcgggcaccaaaaacaaataggggattattttattctgattgaccaagggtatctcatctcctttataaaaagaaaaggtgcgaagcttcaccttttctttgatttattcagctgacgccctcacctgctttgctgccttttgaacggctttcatcacctgctgcggtgtcatgtcgccgccaagcatttgctggacgccagttaggtacgcatctgcgacttcaacatcgacatccatatcaaaccatggaaccattgatttggcatcaacaatatgctgaacggcttcacgctgaatggctgttgcattttcttcagtagccgtaccttgcactgcactgtatttcccgacatctttcacgagcttttcgcccattcttttcgacgtcaagaactgcaaaaattccatcgcttccttcggatgttttgttcttgaggaaatcatgaatccttccggcgctcccgttaacgcttctgaagatcctttctgcccgctaatttcaggaaatgggaacatcccgagattaaccggttcaaccagcttgatttccgctgtttccgcatatatcatcgccgactttccgctcttaaattgctgtctcacatattcgtggtcgacggagtttacatgtttattaaagtaaggcatcagctcttgaagcttttcaagtgcttttacgtagccttcatcagtaaattcacccgttttggcgttatagtccttttcccgtgttttttcatcgaccatccgctgattaagcgtgccgatatagtgcgagattgtccaagtcgcctttgttccgaagctgatcggtgtgtagccatgttctttcagcttttttgacacatcgattaattcatcccacgtcttcggggatcaagattcagcttttggaaaatgtctttattatagaagaatgatttagcgtccatttgccacggcacgccatattgcttgttttcataagtaaatggtgtaatttgcgattgaacgagctgtgatgaccaatcggtgtcatttttgtagtaggacgagagatcaagtgctttattgcctctgataaatttaaaagcaaactcatcgctccaagagaagtaaatgtcaggagggctggtggttcccagcatgaccttaattttatctttataggagtcatttaaaacggcttcaatttgtatatcgatatctgggtgttctttttcaaattccttaacaacctcttcaaaataacttttttccggctccttcggccatctgtggaaaaatttcaatgtcacctttccgtccgctgaactgctttggctcgaacagcctgcaatggtgaacatactgacagctgcaatgatcaagaacaacaacattttcttcaaagggttggcctcctctggacattagactataatgttatataacattatagtctaatgcataatggttcctcattttcagatcaatactcaactttccacatgtatcttctatgagataaaggatgatttctcgcctctgccagctcgtctgcatagcttctcagcacacgattgagaacgagcggagcaagatagcctttaactgaatcgtcaattgcagtgaagtcgtaagatgcagcatcaagcacagtgagctttttgccatactttttcgagaaggtaagcgctcgctcttcaagaggtcttgtttcatctaaaccgagcaggatgataaacggcacggattcatcaataatttcaaacggtccgtgaaaatattctccggcatgaatggcgtgggaatgaatccattgcatttccatgagaatgcagatgctgtaggagtaagcgacaccgtagtttgcaccgcttgccatggtataaataatactttctttttcatgggcttttgcaaattgcttggcgttgtcagcttcctgcttaagggctttttcatatacagcctgcaattgatctaagccttcaattgcttgttggaatttcgtattgttttctaatacttgcagggttccaaaaacgatttgatacaaaacgccatagtttgtattgatcgcaagcgcctcatcaccccaatcgtactgggcaacatattgcgcttcctgcgctaaaggagactccggtttaaacgtcatcgcaatcgtaagtgcgcccttgccccttgcaaacgcagcagctttgactgtctccggggtatttcccgaatgcgagcacaaaataacaagagacttttcaccaagctgaacagggttgcgctgaataaattcgttggcgctgtagaggtcggagtttattgattttgactctctgtcaaacacatacttactcggatacataatggcagaagaccctccgcatgcgacaaagaatacatgatcaatggttttccctttcaaatcctgcaagaaagcttgaacctcacgatttacttttgctgtggcctgactcaaatccttcactccccgtttttattatataacgttatataacattatatattgttatattaaagtccgcgggtaggattgtcaatattattttctgaaatttctcaataatttattcgaatgacagacaaagggtcaataagcgaaaaaatgcccaaatcaaaagccagaacttgacttaagctctggcttcgctgttcaatccgcagactgacgtcttatttaaaaaataccttgtctatattgtacttcgagtgctgtgtattgatgatatatgtttcataaatctctctttccattggatcatcaactacacatacctcaattttataaacttcatctctgtgatgtttgatcggtgaaacagtgtcttcgaaatgcttcttaattctctgtcttaactttctggctttaccgacaaacagcagctcgtcatgaatgttgtaaaacataaaaatgccgcctttgtcccttgggatctggtgaaagtcgatgaatccgtgaatcggttttatcttcggctcgttatcattagctgactgctgtcgttcagtgatggtgacattcggtgcgggtatatcaatttttatcaaaatcagttcacgtcctctttttcattaaagataaatgctaacacatacagaaaagaaaagctagaacagctttattatatttgtttgttatgctcttgcttattatgcaagtgctccggctggatgataaggactaaggtctaattctgtctgctttccgagaactagctttgcgagctctgcacccaagaacggtcccatcgtcagtccagaagcacccaaaccgtttgcagcatataggccttgaacattcggcacggcccctacgaccggcagaaaacccggtgtaaacggcctgaagcccactcttgtttcaactgcagcggcatcagcaagacccggtgcaacggctaacgctttgctcaatacttcgtgcaggcctccggctgtcacacgaagatcatcaaggcctgcatcgttttcgtgtgtggcgccggctacaattctgccgttatcaaacgaaagaatgtactgatcactcggcggcattacaaccggccacgatcctgtatctgtatctgtcatttcaaaatgcataatctgcgctttttgaaatgacacttgaaaatgaatgccaagagacttcaatatctcattggcccatgctcccgccgtcacaatgaccgcgtcagccgcaaactgctttgcatctgtttgcacgccgttgactgttccgttttcaaaaagcaaagacgcatttcctttgatgaccgttgcgccgcgtttctctgcagcgcttaaaagcgaccggcacagcgctcttccgttcacacgggcggcaccgctgatatgaaccgattcatagccgtcagctaaaatcggaaacagctttttcgtttcacttgcagacaagcgggtaatgtcgccgatttccggcgcatcctcccgtctcttatacgccctttcctccattttatcgagtttagacgcgtccgtatgaatgctgatggcaccgacacgtttgtatcctgtatccgtttcaccgtctttttccaattgatggattaaatccttatagtaccgggctccccccttagcaagctggtaccaatcctgattacggcgttgcgagagccatggacagacgatccccgccgccgcatcagtcgcttgtcccggctctttccgatcaatgacagtaacgcgagcgcctgattttgcgagatgataagccgtcgacgcgcccagaatccctgcgccgacgatgatgtacgatttcatatgcaaacaccttttctattataatgtctattcattttaccaaatcgaatgctttccttcgaccttttgccctaatgtggaaaaaccgcgaagttcgtccaatctctttactctcctatcgaatatcctgtcactatcaatagagaaaggatgataccatgagcgaaaatcgtcatgaaaatgaagaaaacagacgcgatgcggcagtcgcaaaagtccaaaacagcggtaatgcaaaagtcgtggtcagcgtgaatacagatcaggatcaggatcaggcacaggcgcagtcacaagacggagaagactaatgaacgaaaacatcattcctctcaacagacatactcaagagatacccactactgaatctgttatcaaaaacagcggcaactcagaggtccatatcgacattcacattgatacaatgccaattgcttttgctatattatgctctgcattagccgcaaagcagatgacaaaagaggaattcgatatggcttatactcaattgcgagagatgaacagagaaaataacagcagatcatctgtaaagcaaattatcaatcaggagacagaagaagagtaaaaaaccgcggcccctcggccagcggtttttcttctgcatacaaaaaggacgcgactgaaaaccagtcgcgtcctttttataaaaaaataatcgattgaaccttccatttcgaacttgattatttttataaaatggtacggaatgatttataaaagggtcacccaaacccttgatttaaagccatttcttcagatggtttaaatgatgataatcttaacttggcaccgtgttggcatgagctgaagccgcatgatataagggtttacagtaataattcacggttgccgccgtgagtaagtttcatatcttttgaaagttattattgaagtaatgcacctgttagttgaactattccacggcttatttaaactgtactaatcttttgaaatagaaataccgttctcaataaaatgctttattcatatttaaatttttgaggctactaggcatacatccaaaccaagttttgaccctgagcgtaaactagttaaaagtctaattgcaataaggagtgaacctcgaataatggtatatcaaagacaaatgacaccctatgccctgaatccccgggatttacaaaattgtttgtatcgtttcacgtatttgtggcttagaaataatgataatttctggtatttcttaacggctatcggagaatcaagagtttatggatataggtttttcggtggaagatggaataattattccgttgatttaagagatattgtttccttctattgttctcctccgactccaactctatattaaaacactgagcctgatatttgcatatgaagaaaatatttgtgaattaaaaaaggtcaaagcaaaatgaattgaatcttgaaatatccaggattcaaaaaaacaaagatgtaatcattttctaaaattacaataggcactatcttacacattcgaaactatcacaagcttcaggggttgaatatagaggcttacacgctttcagacacggttggacactagaacactaaaacaataagtgaaaaatattcacacataactgaaaaaatcgaacaagatgagcttgcaaaatttgcttcttactcaacaagataacaaaaagcttggcataaaaattggcacaatagaaacttggcatatgtcgaaaataagaaaaacccttgataaacaagggtttttcgttagttatccaatagaaccttccatttcgaacttaatcaaacggttcatttcaactgcgtattccattggaagctcttttgtgaatggctcgatgaagcccattacgatcatttcagttgcttcttcttcagaaataccgcggctcatcaagtagaagagctgctcttcagatactttagacactttcgcttcgtgctccaatgaaatgttatcatttaagatttcattgtaaggaattgtgtctgaagttgatttgttatccataatgagcgtatcgcactcgatgttagagcgggcgccttccgctttgcgtccgaagtggacgattccgcggtacgttacttttccgccctgttttgaaatcgattttgatacgattgtagatgatgtgtttggtgcaaggtgaatcattttcgcacctgcatcctgatgctggcctttacccgcaagagcgatagaaagcgtcataccgcgcgcgccttcgccttttaggatacaagccggatatttcattgtcagcttagaaccgatgttgccgtcgatccattccattgttgcgttttcttcacagactgtacgctttgttacaaggttgtaaacgttgttcgcccagttttggatcgttgtataacggcagtagccgccttttttcacgatgatctcaacgaccgcactgtgaagtgagtttgttgtgtaaacaggcgcagtacagccttcaacataatgaacgcttgcttcttcgtcaacaatgatcagtgtacgttcgaactgacccatgttctcagagttgatacggaagtaagcttgtagcggtgtttcaaccttcacgcctttaggcacgtagatgaaagaaccgccggaccaaacagctgagttaagcgccgcaaacttgttatcagtcggcgggattacttttgcccagtgctcacggaaaatatcttcattctctttcagcgcgctgtcagtgtctttaaagacgatgccttgtgcttcaagatcttctttcatgttgtggtatacaacctcagattcgtactgagcagaaacacccgcaaggtatttttgttcagcttcaggaataccgagcttgtcgaatgtttgtttaatttcttcaggaacttcatcccaagaacgctctgaacgctcagacggttttacgtagtacgtaatttcgtcaaagttcagtgagtttaaatctccgccccattgaggcatcggcatattgtagaaatgctcaagtgatttcaagcggaagtcaagcatccattgaggctcttctttcatgcgagaaatttcttctacgatttcttttgtcaatccgcgctctgaacggaaaatggaaacgtccttgtcgtgaaaaccatacttgtattcaccaatatcaggcatttttttagccatccattttcactccaatccttttaattgccgccttcttctttcgcgactcctttttcaagtgctttccatgacagggttgcacatttgatacgggcagggaattttgaaacgccttgaagggcttcaatatccccgagatctatagaatcatcatactctttcccttgcatcatatccgagaaaatcttagacatggaaagggcagtttcaatatctttccctttaatcgcctgagtcatcatcgaagcggatgccattgaaatggaacagccttccccttcaaacttcgcatcttccacgatgtctccgtcaagcttcattgtcagtctgatgcggtcgccgcatgtcggattgttcatatccacgacaatgctgtcattcaaaacccctttatttcgcgggtttttgtaatgatccataatcacctgtctgtacaatgtatctaagtttgcattaaaagacatttgtaaaatactcctttgtcttttgaagagcttccacaagcttatcaatctcttcctctgtattatacagataaaagcttgctcttgcagtagcagttacatccagccatttcatcagcggctgcgcacaatggtggccggctctgactgcgattccctccgcatcaagcacagtcgccacatcgtgcggatgaacatcatcaaggttaaatgtgacaagcccggcacgctcttccggcccgtaaaccgttacgccgtcaagctggcggaagcgttcaagcgcataagctgcaagcttgtgctcatggcgggaaatctcatcaagaccgatttcttcgagaaaatcaatggcggcaccgaggccgattgctcctgcaataatcggagtacccgcttcgaatttccacggaagctctttccaagttgattcataaagcccgacaaagtcgatcatttcaccgccgaattcggcaggctccatgttttccagcagggctttctttccgtacagcacaccaacaccagtaggtccgcacattttatgggaagaaagcgcaaagaagtcgcaatcgagatcctgcacgtcaattttcatgtgaggcgtgctttgtgcaccgtccaccacaatgacagccccattgtcatgagcgattttcgccatttctttaatcgggttgaccgtgccgagaacattagatacatgagacaccgcaacaatttttgtgttgcttgtgaccgtttctctgacgtcttctaaagaaatcgttccgtcttcctgcagcggaatatattttaatgtggcgccagttgcttttacagcctgctgccacggaatgatattcgcatgatgctccatgtaggtgatgaccacttcatcaccaggtttcaggttggcgcgcgcatagcttaacgccaccatattcagtgatgtggtcgtgccttttgtgaaaataatctcagccattgacttcgcgttaataaactttcggactttttcacgcgctccttcataaccatctgtcgctctggttccaagtgtatggacgccccggtgaacattggaattgtattggttataatacttatccagtgtttcaatgacagcacgcggcttctgggaagtcgccgcgctgtcgagataaacgagatcatgtccgttcacttgctgatgaaggatcgggaactgttcacgaatatctgtgatattcattacttcactttcctttcgataacagaaactaattgtttcttaacgccttcaatcggaagttcatttactaccggtgcaaggaatccgtaaatgactaagcgttctgcttcttctttcggaattccgcggctcatcaggtagtaaagctgaatagggtccacacggccgacagatgccgcatgtcctgcagttacatcgtcttcgtcaattaaaagaatagggtttgcgtctccgcgtgctttttcgctgagcatcagcacgcgtgattcttgctccgcattcgctttagaagcgccatgttcgattttgccgattccgttaaagatagaagaagcggaatccttcatcacaccgtgcttcaagatatagccttcagaagctttaccgaagtggatgatttgtgttgtgaagttttctgtttgctctcctcttccgacaacaaccgttttcgtatcgccgtatgtgccgtcaccgtaaaggtttgttgtattttcggaaatcgtgtcgccgtcgttcatcaggccaagagcccactcgattttgctgtcgcgtccgcgcgcagcaccgcggcggttcacataagttgtcacaccgcttgacagattatccaccgcaccgtatgtcacgctggcattatcacctgtgatgacctcactgataatattgaagacagcgtctttcgggtttacagtgctgatgtagttttctacatatgttacagagctgtggtcttcagccacaatcagcacgtggttgaatagagctgtatcattgctttcgtggacataaacagcctgaaccggcgtctccacctgaacatttttcggaacataaaggaatgctcctccgttaacaagagccgcgtgaagtgcagttaacttatgttcgtcaaccttcacgccgtccttcataaagtatttctccaccaagtcgctgtgctcgcgtgcagcagtcagaatatcagtgaagatgacgcctttgtctttcaattcttgagaaagagaaagatgtgccggcgtctggtcacgctgtacgtataatgttttatcttcgttttcaatgtcgatcagcgcttttacttcatcagtcaaatcttctaatgaagaaagcggttcgttatccactgtatgcttcgcgaaattcgtgaagttccagtttgtgatttttgttttgtcaggtttcggcatcggcagatcctcagcttgttcaagagcctgtaagcgcaggttcttcagccaggcaggttcttggtgcttttcggaaaagcttttgagatactcctgatctacggatagttttgtacctagtgtcatattaatccccctaacgcttacgcttcttggccaacagtttcgtcttcaatgccaagttcttgtttgatccagtcataaccttctgcttcaagacgctgtgcaagctctgcaccgccggattttacaacgcggccttgcatcataacgtgaacaacatccggagtgatgtagtttaacaggcgctgatagtgagtgatcatcaggcagccgaagttttcgctgcgcattttgttgatcccttttgatacaactttcaaagcgtcaatatcaagacctgagtcaatttcatcaaggatggcgattttcggttcaatcatcattaattgaaggatttcgttgcgttttttctccccgcctgagaagccttcgttaagatagcgctgagccatttcagggtccatttcaaggaactccatgttttcgtccattttgcggatgaatttcatgagagaaatttcatcgccttcttctctgcgcgcgttgattgctgagcgaaggaagtcggcatttgtcacaccgctgatttcacttgggtactgcatcgcaaggaataagcctgcctgcgcacgctcgtccacttccatctccagtacatctttgccgtcaagcgtgatgctgccttttgttacttcatatttaggatgccccataatagcagctgataaagtggatttaccagttccgttcgggcccattactgcgtggaattctccaccttttatttcaaggtttacaccctttaagatctctttcccttcgatttcaacgtgaagatctttgatcgttaatgttgaagcagccatatctatacctccaaaaatatataatcattattctcattttattctcattctaattttataacaaatgaaaagtaaatacaactttttatcgtgccttgcacattcctcaagtttaacaaagatcagcactttattaaagcgattgaaaaagaaaaagagtggattcccacccttttttaaaagattgattttctcaataagctcccgcagaaatccgcttgcttttttcgtaatcaagctctctctgccgctctactttcattcttgtttccagccggcgtccatattcctcgtatccaattccgtgtgacagctgcatcgctttttccatttctgacgtataatcgaggttcagtctgtcctggctactgcaaataatgaatcaatcccttcatatatttgctttttattgtaccagtgctgcgttggatgccgcaaaaacgatttggcgtgaaatagcggcagatgagacgaaagcatcctttcagaacaaatgagaatggtttttcggaatattccttctcttaatgcgtggtgtttccgaattcctcaatgcactgttgaacgactgtcacgccttggctgaaagctgcgccgcctccaaatgccgctgccacactgacggcttcgagaatgttttcttctgtcgctccctgatcgagacagccttttgtatgatagatcatgcaatattcgtcctgagcattgatggcaattccgagggcgatcagctgtttttctctttcagtcagagaattcccggcaaagcactgttcagtaaattcgttaaattttcttcccatcagcggcatcttttgttcaaatgtgcctaaaccatgtttatattgttttaacgcgtcctgcatgcttcctctgtcttgattcaaagaaaatccctccatctgtttaacattcctttttattatgaacagcttttaggaaaatacgcgaaaaaaccccggaattctcatccggggtttcagtcttattcagatacaggaagcacagctccgtcgtattttttctcgatgaagtctttgatctttttagagtgaagaacttccatcagcgctttgatttttgcagaatcttcttcgccttttcttactgcgatgatgttagcgtatgggttgtttttcgttgattctacttcaattgcgtcttttttaggatttaatttattttggatcgcatagtttacattgatgaagaccgcgtctccttctttgttttcatatgcttttgccgttaattcaggcgctactttttcgaattcaagatttttcgggtttttcttaatgtctttcaatgttgcgtcaactgtttccactttagaatcaagagtgattaatccagcgttttcaagcattgcaagcatacgtccttgttcagcaacgttgtttgtcagaatgattgtcgcaccgtctggaaggtctttcagtgatttgtatgttttagagtaaataccgaatggctctaagtgaacagcgccggcattcacaagtttgtaatctgtgttttctttcatttcttgctcaaggtaaggaatgtgctggaagtagttcgcgtccacttctttatcagctaaagctttattgtacattttgtaatcactaagcactttcactttcagcgtatagcctttttctttcagcaatggttcagcttcttttaaaatttctgcatgcggtgttttcgttgccgcaacgacaatttctttcttgccggattcagcgccgttattcgaaccgcaggcagccataactcctgcaaatacaagcagtaatgcacccaaaaatagctttttcaatgtaaatcctcccttatcgtttgtctataatatttgttattagatcaccgatgatttgaataataaacacgatgattaaaataaacacagtagcaacgaaggtaacatcagcgttattagactgatatccttctacgtacgcaaggtttccaaggcctcctgaaccaatggctccggcaattgccgttgagccgatcaaagcgatggctgtaaccgtaatgccagaaataagagcaggcattgattccggaatcagcactttgaaaataatcgtagacgttttcgcgcccattgatttagctgcttcaatcacacctttatccacctcacgcaacgcgatttcaacaaggcgcgcgtaaaatggtgccgagccgattaccagcgccggcaatgcggcgtttggccctaagatcgtgccgactaaaaatttcgtaaaacctaatagtaaaataattaaaataaggaacggaatcgatctgaatatgttaacaacggccgcaatcactgagttgaccgctttattctgccagaggcttcctttgctcgtcagaaagagcagcaagccgaggatgaccccgatgacaaaagcaaacagtaaagaaatcagcgtcatataaagtgtttcatatgtcgcgttccataattcagttaaatcaacgttcgggaagtatttttcaaacattcgtgatcacctctgctttcacctgtttgtcattaatgaaacggatcacgttttgcacttcttcctcgtccccgtcaatgtggatgaacagtgaaccgtaagccccatccttcgtctgcgaaattttcccttgcagaatattgacgctgacattgaagtttctgatcatctctgtaatcagaggctgttcagctgactcaccgacaaatgtgagctgaaccatttttcctgatgctgtatcatcaagaaggtgctgaagcgtctctttcgtttcttccggctctgtcacctgctgaacaaatcgttttgtcatttgttcctttggatttttaaagacatcgagaacctcgccttcttcgaccaccttgccgttttccatgacggcgactctgttgcagattttgcggatgacatgcatttcgtgcgtaatcagcacaatcgtcaaaccgagtctttcattaatatcggacaatagatccagaattgaatctgtcgtttgcggatctaatgctgatgtcgcttcgtcacaaaggagaaccttcggattgtttgcaagcgctctggcaattccgacacgctgcttctgaccgccgctcagctgggacggatatgatttttcttttccttctaaacctaccagtttaatcagttcattggcgcgcttgatccgctcgctctttttcaccccggcaatttctaaaggaaacatgatattatctctgacagtccgcgaccaaagcaaattgaaatgctggaaaatcatactgatctcatggcgtgcttttcttaaaccgcgtccatttacttcattaattttggttcccgccacttccacggttcctgaggttggtttctcaaggccgttcagcagacggattaaggaactcttaccagctccgctatatcctataattccaaaaatctcaccttttttaatggaaagcgagacattttggacagcattgacatctccatgtttcgacttgtaaacttttgaaacatcctgaagattgatcaaagcaatcacctgccttaacactattctaagaaatcttccggttttttctgcaaaagaaaagcctttctgcacacttgagcagaaaggcttatataaaatgcctttctctcatctttcaaagctgaacgcttcgtgtgaattggcaccatttcaacagtgttgatggttgccgggcttcatagggcacttccctccacctctcttgataagagaaatatatagtctttttcgtccggaaattcttaatgtagaatagcacggcgaatgattaaatgtcaataaaataaatgatgtcaacttttactattataataatttattattttttaattttttaaaatcctctgaaaaaatccatttgtcagccagagaatggcttccagctttaacagggccctgaatgacccctttactttgaggcttccgctctgaatcaggtgctgaagggaaatgtctccgtgcaataaatcaataatttccgtttggtttccgtaaaaggtcaggttggacgtttggggcggagaaacttttttcatttctccctgttcgtttattgagacggttaaggcttctgcttctccttggaaggtaatgagcaatgttgaggcattcaaaaggggttttaaaaacagatgctgatactcatcctctaaaacttccgctttctccatatgtacaacctcctatttgttggtcatacatacacatttctctctttgtcgcaagaacccctttataaaacgaacgacaatttcataggatatgctgagaaatatgtcataaatgggatgcggaagatgatttttgtttgatcagctcatataaataagaaacggaatgaaatgcatatcctctttcgaccatctttccgcctttaaacagcagaaaacaagggacgctttcaatttgatacgcttttgcgaatgtcggagagtaattgacattgttttgatagaaggcgacatccggcagcatttctttcaccactgtcagcattttgcttgcaagctggcaggtgccgcaaaacggagtatataaatatagaaggtacacatcatcttcaatgtgatcaagttcgtgttcttggagttctttcatgctatacacctcgggactttctttcaagaaaaatagtatggacattcagattcgcacgcagtaatacagaagcgacatggtgcctgggagcagccgctacttccttataggctctgtcgatatggagatggcaggcttcattaaattcacgcttcagctgttttctcaatttctcacctgattcatcagcatcaactaatatatagacgtctttatcataaagctcgtcagccaattcctcgagcctcagctggctgattgttccgtttgtgcagataatgcgcaccggttcattcaggacgctttcgattttctctttatctgatttcccctcgacaatcataaccttttccagctcatccatcttcatcttgttcacctgccgcgtcaaatttgaaacgttcagattgtaaaagaaggcagtgaaattcaccgccaacattaacaccagccgttttcgtagtcacaatctacatattttgcgtcgtctccagagaccacatcggctgtcttataaaatttctcattttcaaaggaataaccggacttaagctcatattcattcatgcttgtcatttggccgatcatctcattatcatgatataacgagagccggccattttgaaagcggcctgtcacgtcattggtgacatcgagcttttgtttgtcgaaagccatattggacacctcccataacgttagcgtgtccaattgcttttacggctatcctgttttagtcttcttgtgtcatctcttcgtattgctctgctgtcatcagtttttcaatttcagaagcgtcagatggctcaacgacgatcatccatgctttttcgtacggagattcgttgacgaattccggactgtcatcaagatcttcgtttacttccacaaccgttccgttaatcggtgcataaagctcagataccgttttaacggattcaacactgccgaatggctcgtccgctttgatttcagcgcccacttcaggaagttcgacaaacacgatgtcgcctagttcggactgggcaaaatgcgtaattccgattctggctttttctccttcaacttttacccactcgtgttctcctgagtaacgcaaatcttttggtatgctcaattgaatccctccattttttacagcactacaataagaagataccacacttttcaaaaaaaatttacattaagcccagttttcttcaaattggtcttctttaaatccgacagtcactttttcaccgtctgttgtaagcgggcgtttgatcagcataccatctgaagccagcagctcgagctgttcgtcctctgacatgtgatacagcttttccttgagattgagctcgcggtatttcatgccgctcgtgttgaaaaatttcttgagatccagcccgcttttttcataaagcgcttttaattcttctttgcttggcggctgctcagcaatatgtatttcgtttatttctttcccatgctcttcaagccacttctttgctttgcggcacgttccgcatttagggtaccagtaaaaagttaacgacatcttcttccccctcaataaaataatcgaggttattttaacacagtttgttttaaaaacctaaaacagtgcttcttaaaaaagagctccgcgcatgcggagctcatggccaatcagacagtatatttctcagcctcaaaaatgcctgccgccgcctcgcgttttttctgaatcacgtttttaggcgttacgcgtgtcagcttgcgcagagcggaaagcatcatgcggagtgaatctccttcttccattgcgataagggattccttcgcatgcgcttcaatttcgttaaaggcctcttgaacgaaaatttctgtgtacagcaccttttgcgctgctttttcagcgccttgtgcggcaatggccttttccgttctgagcacggctgattccattgcgtatacattgctgacgatatccgctacgttcacgagaatttcttgctcacgatcgatcgcttttccgtatttttgcgcggctaggccggcagcaaacaacgcaatttttttggcttgcttgacgatatatttctcctgctctaagacgccgcttccaggctcttcaggcataagcatcatgagttcttcctgcagcgactgcgctttttcgaataaaggcagctcgcctttaagcgcttttttcaggaaggtgcttggcacgattaaccggttgatttcgtttgtgccttcaaaaatccgattgatccttgaatccctataggccctttctacttcgtattcctgcataaagccgtagcctccatgaatctgcacgccttcatcaacgatataatcaagcgtttcagagccgaataccttattcagagagcattcgatggcgtattccgcaatcgatttggcgatttgccggccgtccttgagatcttcggccgtgaactggctcatattgtcttcaaacagcccgacggttctgtatacagagctttccatcgcatacagccttgaggccattgtcccgattttttcctgtgtcaatgaaaaaccagcaatcggcgttttaaattggcggcgctgatttgcatatgccgcagacagctcgatgacgcgtttagatgcgccgattgtgccaaccgccagtttgtaacggccgatgtttaaaatattaaaggcgatgacatgccctttgccgatttctccgagcaggttttcctttggcacttcagcttgatccagaatgagggttcttgtcgatgatcccttgattcccattttcttttcttccggtcccgtggagacacccgggaactctttttctacaataaaggctgaaaacttgtcgccgtctatcttggcgtaaaccacaaatacatcggcaaaagcagagttggtaatccactgtttttcccctgttaatacataatgggttcctgcttcattcagcacagctgttgtttttgctccaagtgcatcagatccagagccaggctcagtcagagcataagcggcgatcttttcgcctgaagcgagtccaggcaaatattttttcttttgttcttctgatccgaaaaagacgatcggcaaggaaccgataccgacatgcgcgccataagaaagagaaaagcttcccgcacgcgaaaatttctcagtgatgagtgccgagctgattttatctaggccgagcccgccgtattcttccggcacatcggcaccaagcagccctagttcgcccgctttcttcaacagtctgacagaatgctcgaattgatggttttcgatatcatctatatgagggagaacatcttgctcgatgtaatcctctgttgttttcgcaatcattttatgctcgtcagtgaaatcctccggtgtatacatttgatcgtatgtgacatcctcgattaaaaatccgccgcctttttgtacgtcagccgctttttttgccatttgtttttccccctttagcataattcaaatacaccggccgctcccattccgccgccgatacacatggtcacgactccaaattgctcgtttctccgtttcatttcatggatgagtgagagtgtaagctttgtgcccgtacagccaagcgggtgtccaagcgcgattgcgcccccgttgacattcactttttcttcatcaattcccaattccctgattacttgaatggcctgtgaggcaaaagcttcattcagttcaaacaagccgatgtcctgcagctgaagtccggcaagcttcaaagcgcgcggaatcgcttccaccggtccgattcccatgacttccggcggcacgccgcctactgcaaaggaacggaatttcacaagcggcgccaggccaagagcatcggctttttcccggtccatcagcatgacagccgccgctccgtcacttgtctgcgaggaattgcccgcagtcaccgtcccatcaacggaaaaggccgggcgcaatgtcgataagatgtctgcagtcgtttgcgggcgaacaccttcatcctgagaaaacacaaactgtttttccataggcttatggtcttctccgatttctgtcaccgtcacttctacgggtacaatttcatctttaaattttccttctgcaagggctttagcagcgttttggtggctgcgaacggcaaacgcgtcttgatcctcacgggagacgccgtattttttcgcgacttgctcggctgtgtggcccatgctcatataatattccggtgccttttctgccaaagcaaggttcggacgggtaacatgccccatcatcggaacttgcgacatggattctgctccgccggcgatcgctgtatcgtaggcgcccagcataattttttctgctgcatatgcaatagactgaaggcctgaagagcaataacggttaactgtaatcgccggaaccgtgtacggcaggcccgcgagcgcaccgatatttctcgccatattaagcccctgctccgcttcaggcgttgcacagccaataatcaaatcgtcaatattgccttcgtaaccgcctgcccgtttcagtgtctcttttacacaaatcgctcccaaatcatccgggcgaacggtggccaacgatcctttttttgcttttccaaccggtgttcttgcacctgacacaatgactgcctctttcataagctccctcctaattccgtaaaggtttacctttcacaagcatatgctgcattctcgcttgagattttgcctctcctgacaaactcaaaaacgcttctctttcgatctccaataaatactcttcatcaacctctgtaccaaacggcacttttccgcccgcaatgacataagcgagttttttcgcgatcttaaaatcatgctcagatatatagccggacagcttcatctgctcagcgccaagcaagagtgccgcataaccggtttctcccggcaccttgaccttttcttttacaggcggccgccagccggtatcgtataaagatgcggccagctgcttcgcatcgtataacaggtggtcttgattcacgctgatctgatccgtttcttttaagatgttcatctcacgagcctcttgagcggaagcggacactttcgccatcgcgattgtttcaaatgttttcattgccgcattcatcggatcatggccgcggcgaagatggttgatgtacagctctttgttacctcctccgccagggatgaggccgacaccggattccacaagtcccatataggcttcgcttgccgcttgaatgcgcgccgccggcaggcatgcttccgttcctccgccgagcgtcatgccaaatggcgcggcgacgaccggtttcgcactgtatttgatcttcatcatcgtctcctgaaaacggcggatcacaaaatcaacttccaaaaagttgtcatcttggacttccattaagatcatggcgagattcgcgccgacgcagaaatttttcccttggttgccgatgacaagccccttgtaattccgttctgtttcctctaatcctttgtggatcatttgaatgatatcgaggccgatcgcattgcttttcgaatgaaattcaagaagggccacatcatctccaaggtcaattaagcttgctccgctgtttttcgcaatcacgccttttgtttctttaagtgcttgtaaatgaattcgttttttattttctttcacggctctgtattcgccgcggtcataataaaataccgttccgttctctttgatgtagaaggtttcatttcctttgtccagcatctcttttatccagccaggcatatctgctccaagctgctcaagcttttccgctgactgcttgaggccgatggcgtcccacatctcaaaaggtcccagttcccagccgaatccccacttcatggcttggtcaatcgcatgaatatcatcggcaatctcgccaagcagctcggctgagtaaagcagggtttgagaagtgatattccacagcaaacggccggccctgtcatccgaataaataagcgctttcattttggcttttgtcccttttgcctgttttgccgcttcaagtgccggtgatttcatttttgtccgctcgccgtaagtaagcgtcactgggtcaagctcataaatcgtttttccttcttttttataaaagccttggccggccttgcttccgatccaccctttttccagcatatcgttcatgaagcttggaaggcgaaacacttctttttcatcgccatcagctttgtcatacacatttcgggcaacgtgggcgaatgtatcgaggccgaccacatcaagcgttctaaaggtggcgcttttcggcctgccgatcagcggtcctgtgatcgaatcaacctccccgacctgataaccgcctttcagcatttcttggactgtcacgagaagcccgtaagtcccgatgcggtttgcgataaagttcggtgtgtcctttgctgtaacaacgcctttcccgaggacattttctccgaaagctgtcataaactttaaaatatcaggatccgtttccttaatcggaatgatctctagcagctttaaatagcgtgcgggattaaaaaaatgcgttccgagaaaatgggctttaaaatcatccgaccggccttcagccatttcctgcactgatatgccggatgtgttgcttgagacgatgcttccagtctttcgatgttcatccacaagagcgaaaattttctttttgacttcaaggttttcgacaacgacctcaataatccaatctgcttctttcagtttttctgcatcatcctccagattgcccggtgtaatataggaggtatttttcgctgatgtgaggggagcgggcttttgtttcagcagttttttcaccgcctgccggctcagcctgctgcgcatctccggactgtccttcgtcagcccccttttttcctcttcctttgtcaaatcgttcggcacaatatctagcagcaggacaggaattccgatgttagccaaatgcgccgctatcccggaacccattacccccgatcctaaaacggctgccttccgaatgtgtttgtgcatgagatatcccccttgaacattgaatgaatagtcattcattttttgaccaaaaaaaatgaaacccgtttcttctttcatcttaaaagatttccggttcgacttcaatagctaatttgttatttttttgtatgaagcctataaaagtcgggcaacttaagcccggaggtgaagggaatggtacgagagaaaaaaaatccgtcttcagcggcagtcagcgcggcgagcgtaaagggagatgccggtccgactcagcattacggcggcggaaaactgacaagtcaaaatcagcagtataaaaaacataacatggaacaatcataatgcagctgcttcccgcggctgctttcactttttcaaaattccttttaacacaaacgctgcattggcaggccgctcggcaattcttctcataaagtagctgaaccagtccgttccatatgggacatacacacgcattctgtagccttccttggcgagttccttctgacgctccggcctgatgccgtatagcatttgaaactcaaattgcgacgcggggatttgatgttcggtgacaagctgtttcgtaaatgcaatgatgtcatcgtcatgtgtggcgacagccgtgtagttcccgcttaacaactgcagctttattaagctctgaaaatgaaggtccgttcctcttttgtcgggaaacgctacagccgcagattctttataagcgccttttacaagtctgagattcggctttaagtcccgcatctttctgatatcttctgccgcccggtacagatacgcctgaatgaccgtgccgagcttctcaaattcctgtttgcattgcctgtaaatagaaagtgtctgttcataatgagtatagtcttccatatcaatggtcacagcaacatcatattgcttcgcaacggaaagaatggcgcgcaaatgagtaagagcaagttcttctgaaagatcgagcccgattgaggtcagcttaagtgaaagctctgaattcaattgatgttcggcaatggcttgaatggctttcttgcattcctctgcgacttggtttgcttctttttccgaagctgcatactcgcctaaataatcaattgttgcacacaaaccggatctgtttagccttttgacggtcttaaccgccgattcaatcgtatcccctgcgacaaaccttcgtgctccaagccgcgttccgtatgcttttgcgaacttggtaagtgttttattttgagataagaataaaaacacatgtctcagcatccgactccctcccgccgtcatcttcaaaacacctgtatataactcccagtctgaaggaaactataaaatgaacagaaaccaaaggaggatcacaatggataatcagcagcaatctcaaatgccgccttccgttatttcgacaaaggatcatttgtatctcaatgacatgctgaactggaatttgctcgcgatgaagaaagcgcatttcatggcgcagcagtgccaggatcaaacgttaaagcaagaactcgaccgcgtcggacacatgcatcatgatcactatcaaagaatattaaagcacctgcagccaggccagcagcagtccggctacatccaataaggaggcgccagaatgaatcagcaaaatcaaaaaatcagcaacccgcagacacctgtaccgacaacatcggaaatgaatgacagagatttcgtcaacgaattgctgacaaccgaaaaatacatgacaacagcttattgcactgctttgcacgaattcagccacgagtctctttatcaggatattcaatccatttttgatgagtcacaaaaagcgcaaagaaaactatatgatctcatgtttcaatatggatggtattctgttgaagcggaggatgcacaaaagctgcagcagtcctatcaaaaattccagcagaccattcagcagcagtctccttatcagcaataacaacattagtaaaaaggatacgatgttctttagggcatctatcctttttttgtgtaaaatcagttgacttttcatttacgcttatttatatttaataagcattaactattttgtcattaaaatatatatacagtgtatgtaacagaggggaaatgaatatgaagagtgcggatcagttaatgtccgatattcaattatcgcttcaggcgctctttcaaaagatacagcctgaaatgctggaaagcatggagaaacaaggtgtcaccccagcacagctgtttgtgctggccagcctaaagaaacacggcagcctcaaaatttctgaaattgccgagcgtatggaggtgaagccaagcgcggtgacgctgatggcagatcgccttgaacaaaaaaatcttatcgccagaacacacaacacaaaagacaggcgagtgattgatctcagtcttactgacgaaggagacagaaagttcgaggaggttttggcaggcagaaaggccattatggcgcgctatctttcctttttgacgaaggaggagatgcggcaggcggcgcatattacagcaaagctcgcacaagcagcagaaacggatgaaaagcaaaacatgaaaagaggaaacggatgaaaatgagtaaagaaggcaaacaatcaaaacgaacgttattaataacaggcttaattattgccatgtttttttcagcccttgacggtaccattgtcggaacggccatgccgaaaattgtcggtgatctgggcggtttgagcatgatgacctggctgacaactgcatatttgttaacatcaacaaccattgttccaattgccggtaaactggctgatttattgggacgccgcattgtctatgtatcaggtttaattattttcatggctgcttctgctttgtgcggaatggccaacaacatgacagaattgattatcttccgtggactgcagggaatcggcggaggcatcatgatgccgatggcgatgattgttatcggtgacttgttcacaggaaaacagcgtgctaaattccaaggtgtctttggcgcgatttacgggctggcttcagtgattgggccgcaaatcggcggctggattgtagactcgttaaactggaaatgggttttctatattaacctgccagtcggaattattgcggttatttttattgccagaggattacagggacgccagcagactggtccgatcaacttcgatatcgctggtattttcacaatgattgtcggtgtggtcagcctcctgctcgccttaagctttggtggaaaagattatgcatgggattcatggcagattcttgggttgttcgctctcgcactgatcggcattgtcagctttatcatcgtagaatcaaaagcaaaagagccaatcctgccaatgtatttatttaaaaacagaacatttacatttctaaacttgatcggcttctttatgagtatcggtatgtttggcgccattacgtttgttcctttctttatgcagggaattgtcggtgtaagtgcgtctgaatcgggtacaattatgacaccgatgatgatttctatgattattacaagtatcatcggcggacagcttgtttataaaatcgggattaaaccgcaaatcattgcaggcatgctggttatggccggcggattcctgctgttaacgaccttggatctcgacacgagcaagcttgtcgctacatcttttatggcgattattggtctgggaatgggtcttgttatgccgattctgacattggctttacaggaaagcttttcgaaggaggagcttggagttgtcacttcatccagccaattcttccgttctatcggcggaacattcggcattaccatgctgggagccgtaatgaatgcgagatcaggaaatctattaacagataaattggttccatatttagactctcttccggcacaggcaagctcgtttgccgcccagctaaagggtatgattgatacaaatccgcaagggctgctgcaatcactgttcagtccggacgcggtcaaacaaatccctgcggctttctcatcccatattgtgccgattttaaaaacatcgttgatggattcgctccacagcgtgttttatacgggcctgatctttatcgcagtcggagccgtattcaccttgttcttaaaacctatcaagctatcaaataagaaagcggaagaccaacaagaaaaagagaaggcggcaaaagccgttgaatcaccttcccattaatagagcaccccgcgggtatcaatccgcggggttttttattcaatcatctgggctcttccatttccgaaagaccaatcctcagcctgatttccggccagcatgataaacacatcttcttttcttacaccaagctcggaatgaatccggctcgcgattgagcggtaaagtgcttttttctgttcagttgttcttgactgtttcagtgtaaaatgaatgtatatcagttcatcagtacgctcgacttggagataaaatggatcataaaaaaattcgcttttttcatattgtctgatgacttggaaatagtcatcttccggcacattgatttcttcaatcatcgattggtggatagtcctgctcagtttttgaagccacacttcgcttcttcccgaccgtaaatgaatctgtacaaatggcatctccccgcatccctttctttacagcgtctgtccgctgtcaattgtgataatttggcctgtgagtgattcctgttcaattagtgaacaaatcaatttggcaacatcatctggttcagcaatacactgcagcggcaaagagccgatcatgcttttcattttttcttcccgtccggcccaccatctcgttgccacagctcctggtgctacaccgctcactctgatttcaggcgctaaggcgtgggccaatgatttcgttaaaccgtgcaccgctgattttgatactgcgtaaggcatagatgagccgacaccagttatccctgcgatgctgccgacgtttacgatcgccccggccttgcttttcttcatgaacggtaccactgctctcgcgcaaaaaaacatccctttcacattgacggcatacagctcatcccagacgtcttctgtcgcagcctcaagatcatccattggaatatgccgtgtaatgcttgcattgttgactaaaatatcaaccgtgccgtgtgtgctcacgattgcttgaatcatatcctgcacgtcgctgtttttggatacatctgcttggatggcgaaggcttgcccgccagctttttgaatcttttccactgtttcctccgcttctgattgcgagcgtgaataattcaccgccacaatcgtcccgcgctttgccaattccatactggctgcttttccgattcctgtgccgccccccgttacgagagctattttgttcaagacattcattgccgccactccttgctgttgactaaagtatatttctgattccattgtaatccagctttgatgttacgtataatgattgttaaagatactagatatcactcagattgatagtaaacgaacggaggagttcaaaatggaaagcggagatttacgtgtgtttcaaatggtagctcgtgaagggagcattacgaaagcagccctgcagcttggctatgtacaatcgaatgtcacggccagaattcaacaattggaagctgagctgggtaccacactgtttttgcgccataatcggggcatgacactttctgcaagcggaaaattgctgctggactacgcaaataaaattataggccttcttgatgaagcgtctaaagcgctctcatcctccgcagaaccaagcgggccgcttatgatcggctccactcagacaaccgccgcggtaaggcttccaaagcttctggcatcttattatgaagaacatccaaacgtccagctgtctttaacaacaggacatacgcaatttctccttgataaagttcttcgttatgaattggatggcgcgtttatcggatgcgaatgccatcatcctgagctcgaatcctatcctgcgtttgaggaagaaccagtagttgtttcggctgcctccgtgcccgatgttgaggaagccatcacaaagccgattctcgtttacagcacaggctgttcgtatcgagaaacacttgaaaaatggctgcgctccgtcggtgtcacacagccggtcattatggaatttgggacgcttgaagcaattatcggcggggttacagcaggtcttggcatctcgttgctgccaagaacggttgtgcagaaacatgaagcagaaggatcaattcgattgtacccgctgcctgaagcgctcagccagatgaaaacagagtttattgttcgaaaagattcgtttatcagcagcgcgctgagaacctttatggattcctttacgccagataaaacggctgaatcacaaaaaagcagtctgctataatgtacagactgctttttggctattgtttgtttcgatgcgcttcatttaattccttaatatgctgaatgatctctttaatgccctgctttgcgtcggggtatgtcgcattccaatgcttagcgagcggtggcatgctcttggctatatgcgtgtacaaaatccattgcttcacttcttcttttagctcatcgtttgtctcaccaagcagaagctcagtatacttctccagcaatccatccagctgctcctgaagtttttgttccatttgccatcttcctttcgaaaaaacagcaaggagctttctcaattgaaagctccttcgctgcgttatttatccatgtgatgtgaaagccgcttcctggacaatgcatctgcccctgccatgaggaatgcaaagaggcgttccgaagagcgggtcctgtgtaacctgacagttcatagaaaacacattttgcacaagatcacaagtgatgacctcttccggacggccttctgcataaatccgtttatcttttatggccacaagatgatgcgcatagcggcacgccaagtttaagtcatggagaaccataacaatcgtccggccttccttttcattcagctcaaacagcaaatcaagaatttcaatttgatgcgtcatgtctaaatacgtcgtcggctcgtcaagaaggatgatatccgtttcctgggcaagcgtcatcgcaatccaagcccgctggcgctgtccgcctgacaaagaatcaacggcgcggtcagccatgtcctcaagctttgttgctttaagcgctctttcaactgcttcctcatcctcttttgaccactgcttcagccagttttggtaaggatatcttccttgcttcaccagctgatgcaccgtcagcccctcaggagccgaaggaccttggggcaggattgcgagctcttttgcgacttccttcgtcggaagcttggcaatcgctcttccttccagcagcactgaaccgcctctcggcttcatcaggcgcgctaatgaacgtaaaagtgtcgattttccgcagccattgctgccaataaatacggtaatttcacctttgggaattgttaaattcaactcatcaataataacggcatccccgtatcctaagctcagcgtttctgtagaaattgcactcatacccataaccgctcctttttgctggctttttagcagcactatgtattgcacgttttctatatacatgcttttaagtcaattatcatcaatgcaagtgattccgatattcagccatttgatatggtcatatatccctcattgtagcagaaaacactgactttgaaaatcattttcaattagttttatggacataattgacgtttatgggttttttatcacaagattacttcttgatttctctgatggagccgtccttcagcttcaattttaaatcgatatgatcataatgactgtccagattaaatgctgccagcacactgtgtatcacttctgtttcagccatttggtctgtcacggaaagctcgctcaaaatcattttcatctcatccaatgcttcttctccctcctgattgacaccggagagcttatcctgtatttccgctttttcctgagttccgttctttgtatagattccttcataacggttatgctcaccatccccgtagctcacacgaagcgaaaaattactgtagggaacggacttcagctgggtgacggctgtattttctccttctgcctgctgctggtcttcattgagacggcagcccgcaatcagaaccactgcgagacatacagccccggctgctctgaccaaatgcatatgtttcccccctgtaggattccatttattttaggtatatccagagaatgaaatcctcattcagagaagaattgaaaaagccggggcatttaacgccacggctttttctttaagattcggtcatttgtaaaaaggtttcggcgtcacgcacagccagcttgatggcattctcccagaaatcgcgctttgtgatgtcagcgcccaaatgcttcatcgccaaatcctccactgtcatagaagccgtatcgcgcaatagcgccatatacttctcttcgaatgtgtctttttcttcaagcgccaacgcgtaaataccaagagaaaacaggtagccgaatgtataagggaaattgtaaaacggcaccctcgtgatgtgaaaatgaagctttgatgcccaaaaaagcggatgatattcttctaacgcattgcagtatgcctctctttgcgcctcttccatcagctcattcaagcggctggccggtaccactccccgctttcgttcctcgtagaatctcgtttcaaatagaaatcttgcgtgaatgttcatgaagaacgcaacgcttctttgcactttatcctccagaagaacaagcttttcttccctcgtctcggcctgctggacagtcgcgtccgccactatcatctctgcaaacgttgaagctgtttctgcaacgttcatggcgtaggaacggtttaacggcctgacgttgagcattgcttcctgatggaacgcgtgcccgagttcatgcgcaagggtagagacatttgaggcgcttcccgaaaatgtcatgaaaatccgggattccccgctgtccggaaaactggtgcaaaagccgccgactctttttccgctcctgtcttccgcctcaatccagccgtcccgaaacgctttttcagtgaatgaggacagctttttgccaaacgttgaaaactggctggtaatgatatttgcggcttcatcatacgaatagacctttccgtcagaaccgatcggtgcctcgacatcgtaccagctgagtttttcaaggccgagcatggatgctttccggttcaaaaactgaacgaacggcttcttgttttcagtgatgacctgccacatcgtatcaagtgtttcttttttcatcctgttaatttgcagcggttccttcaggacattctcccagccgcgcgctttataggtttcaagccggaatcccgccaaatgattcagcgtgctgctgaaaatatcttgcttgctctcccaagcttggcggaaacgttcatatactgtttttctgacagtacggtcttgatgatccatcatattctccgcctgaccgacagacaattgcttgttttcaccgttttcctcatacgggatcgtcattttcccgacaaccatattgtataagtcactccaagcgtgatatccgtccaccgcaaggtttccgatcagtttttccttaccggggctaagcttttcggcaaccctctgtcttctttcatttaatatgtaagaaacatcgcgcaatcccggttttgttaacaattcattccacacgtcttgattaatgtccacaagtttatgatctaatgtaacgagcgacgattgaaaatctgcggaaagccgattcatgagtgcctgatgctctatagccttttgatcattgatattctgggcctggaggcaagcaacaaaagcgccggcctgctgaagcttgacggatgtctgttcgaataaatcaagcaacgcggtcagcccttcagcctcttcaggcgattcaggcacctgaaacgcatcagtcctgtcttgaaatgcacgcagactttgtgacagcttctcaatataacctttgaattcttccgattggctcccgcccttaaaaaatgaatcaagatcccatctttggcctaccccttgcagcgccatatcacaaaacccctttccttctttcgttctattatagaacaattctgaattattgtataaaaatttctattacaggcgtcatttcgtgttcaggatagtacaatagctgtagcagtttaataggagggttaggatgaataaaaaaatagccatcgtaacaggagcgtccagcggcttcggtctgctggcagctgtaaagcttgcccgatcatttttcgtgatagccacatcaagacagcctgaaaaagcggaacagcttcgagaattggctgcagcacacaatgtgtctgattctattcacattacagctctcgatgtcaccgatgaacaatctatagtctcattcggaaaagctgttagtgcttacgccccgatcgatttactcgttaacaacgccggaacggcttatggaggatttatcgaggatgtgccgatggaacatttcagacaacaatttgaaacgaatgtcttcggtgtgatccatgtgacaaaaaccgtgctgccttacataagaaagcatggcggcgcaaagattataaacgtgagcagcatcagcggactgacaggattcccagcgctgtcgccatatgtttcttccaagcatgcattggaaggtttttctgaaagcctgcgtatcgagctgcttccgttcggtatcgaaaccgctttgatcgagccgggctcatacaagacatcgatctggtcaacgtcattatcaaattttatgtcggtgcctgctgacgattcagcctatcatcaatactataaaaagatcctttcctatgttcaaaaaaacggagaagaaagcggagatccccaagaggttgccgacctcatttatcaattggcaacaaaacagcacataaagaatttgcgatacccgatcggaaagggcatcaagctcaccctgctgttccgatcgctttttccttggtctgcgtgggagtctatcctgaagaaaaagctattcagctgatctaaattataattattataatttagtattgatttttatttagtatatgatataattaagtcaacagatcacaaggaggacgttatcttatgaaaactgaaaacgcaaaaacaaatcaaacattagttgagaattcactgaacacacaattatcaaactggtttcttttatactctaagctccaccgtttccattggtatgtgaaagggcctcatttctttacattgcacgagaaatttgaagaactttatgaccatgcggctgaaacagtggataccatcgctgagcgcctgctggcgattggcggacagcctgttgccacagtgaaagaatacactgagcatgcatctatcacagacggcggaaacgaaacatcagcatcagaaatggtacaagcattggtaaacgactacaaacaaatcagcagcgaatctaaattcgtgatcggcctggctgaagaaaatcaagacaatgcgacagcggacttgtttgtcggattaattgaagaagttgaaaaacaagtgtggatgctttcctcttatttagggtaacaaaaaagctgaaccttaatcgggttcagctttttgttttttcttagcttgaactgctttctgtctgcttggtcagtgttgcgttcaacgttttcgtttttccctttcgcagcacttggattgttgttttatctccgacttttaagtctttgtaaaggatctgacggatatccgcactgctttccacgtctttaccgtttagtttgacaatgacatcctcagatttaatacctgctttttctgccggcgaatttgcttgaacttcttttacataaacacctttgcccaattgatctccaaacaggccgagcgtattttcctgataggtttcaggaacttgtgacatgtcaatcatctgcacgcctaaaaacggacggtccaccttcccgttttgcagcagctggtcaacaatcggctcgacatcattgcttgggatcgcaaatccaagtgattccacgccgctttcgctcaccttcaagctgttgatgccgatgacctggccgcttgcattgattaatgggcctccgctgttccccggattgatcgctgcatcagtttgcagcacgttcatttccaccgtcccttgtgttgtatccacatcaattgtccggttcaatccgctaatgatgccttgtgtcaccgtaccggaaaactgctgtccgagcgggttaccgatagcgattaccttttcgccagtgcgcagctgtgaagagtcaccaaagctcgccactttttttacattcttgccgctgatttccaaaactgccaaatcagtaatggtatcgctgccgacaagcttggcagtttccgtttctccgttgtatagcgtaacagtcagcttgttcgcgccttcaacgacatggttgtttgtaatgatatacgctttatcgctgtcttttttgaaaataacacctgacccggttccgctttcactttctgagctggagcctcctcccgtgccgaatgtgttattttgagaggtttggatatttgagattccgacaatcgtaggctctaaatcctctaccatatcagcgatgtttgatgcgttcgttatcggcgccgttgtaaaattatcagactgcacctgtttatttgcggaagcggattcggtcgcctgattttggtctgacggcagataaggcgcgatgccaagcatgaggcccccgccgataataccgcctaaaatcgggctcagccatgcggctctccgtttcttttcttttttcacagccgtttcttgcttttccatttctagtgcagaagccgtttcctgccgtcccgcttcatatgacacaggcgcgtcaagcaattcttgttcagaatgtccaatcagcttctggttttctgtattctgctgttctgtatgtgaaggttcagtttgatgttgatcgttttggccatcacgtcgataatccatgttcttacactcctttaacggttattcatttatcgttacatattcatcgcatgtacaagttcaattgtcccaataatgaggagaaaagcaaagcaccaaaatagaatatgtttgatcatcctacatcttcctcgctctttttctcttcctttcttcccttatacatatcataaacaaacattgtgggataaaaatgaaaagaatatgtgaaattatgaaaattgcctgccgtatgttaaaactagtttataatgacgttgaaaggatgtgaagagccttgtcatacaccatttatctagttgaagatgaggataacctgaatgaactgctgacgaagtatttagagaatgagggctggaacattacatcttttacgaaaggtgaagacgccagaaagaaaatgacaccgtctccccacctatggattctcgatatcatgctgccggataccgacggctatacattaataaaagaaatcaaggcgaaagatcctgacgtgccggtcatttttatttccgcccgagatgcggatattgacagagtgcttggcttagagcttggcagcaatgactacatttcaaagccgtttctgccgcgggagctgattatccgtgtgcaaaagctgctgcagctcgtatataaggaagctcctcctgtccaaaaaaatgaaattgccgtctcctcgtatcgggtcgctgaagacgcccgcgaggtctatgacgaaaacgggaatattatcaatttgacgtcaaaggaatttgatctgctgctattatttatccatcataaagggcatccatactctcgtgaggatatcctcctaaaagtgtggggacatgactacttcggaacagaccgggtcgttgatgatctcgtccggagactgcgcagaaagatgcctgaattgaaggtggagacgatttacggtttcggctacaggatgatgtcatcatgaaaaacaagccgctcgcgtttcagatatgggttgtcatatccggcatcctgttagcgatatcgattttactgcttgtgttattttcaaacacgctgcgagattttttcactaatgaaacgtatacgacgattgaaaatgagcagcatgtgctgacagagtaccgcctgccgggttcgattgaaaggcgctattacagcgaggaagcgacggcgccgacaactgtccgctccgtacagcacgtgctccttcctgaaaatgaagaggcttcttcagacaaggatttaagcattctgtcatcttcatttatccacaaggtgtacaagctggctgataagcaggaagctaagaagaaacgttacagcgccgacgtcaatggagagaaagtgttttttgtcattaaaaagggactttccgtcaatggacaatcagcgatgatgctctcttacgcgcttgattcttatcgggacgatttggcctataccttgttcaaacagcttctgtttattatagctgtcgtcattttattaagctggattccggctatttggcttgcaaagtatttatcaaggcctcttgtatcatttgaaaaacacgtcaaacggatttctgaacaggattgggatgacccagtaaaagtggatcggaaagatgaaatcggcaaattgggccataccatcgaagagatgcgccaaaagcttgtgcaaaaggatgaaacagaaagaactctattgcaaaatatctctcatgatttaaaaacgccggtcatggtcatcagaggctatacacaatcaattaaagacgggatttttcctaaaggagaccttgaaaacactgtagatgttattgaatgcgaagctcttaagctggagaaaaaaataaaggatttattatatttaacgaagctggattatttagcgaagcaaaaagtgcagcacgacatgttcagtattgtggaagtgacagaagaagtcatcgaacgattgaagtgggcgcggaaagaactatcgtgggaaattgatgtagaagaggatattttgatgccgggcgatccggagcaatggaacaaactcctcgaaaacattttggaaaatcaaatccgctatgctgagacaaaaatagaaatcagcatgaaacaagatgatcgaaatatcgtgatcaccattaaaaatgacggtccgcatattgaagatgagatgctctccagcctctatgagccttttaataaagggaagaaaggcgaattcggcattggtctaagcatcgtaaaacgaattttaactcttcataaggcatctatctcaattgaaaatgacaaaacgggtgtaacgtaccgcatagcagtgccaaaatagactgtagatgttttgcagtctatttttttatgtgaaagaatagccgttaaaatctctgtaatttgttttgagcggctgtttgcattgatgaacccattttttctctgacaaggtctgcttcggatatttgactttctccactttgattcctctgtttcgcaagcggctgatcatttcgtccaattctctcattctagattcaccctttcgcttgagctttgaccattcggtcatctcaatttataatataaataatacatgataaaaaaacaagttacaataaggttaattttataacagacggtgtgactatatggtcatatcctagcaggcctccgggctccgaaagggtggaaccattgaaggaaaaagaaaaactgattattgaaacagccttaaaactatttgcccaaaaaggatacaactcaacatcagtccaggaaatcgcaaaagaatgcaaaatatctaaaggcgctttttatatttattttccttcgaaagaagcgcttcttctctctatgctgaactactattatgataaaacgtttacccgaattttaaatattaaaacgaagggcgacagccccagaacggcttaccgtaaacagctgaccgtcctctatgaaaacattcttgaacacaaagattttatcagcatgcagttgaaggagggttctctgccttacacagaagaagtggagcaatgcgcaaaaaaaatccgccagtcctcacttcaatttcatatcgacagcctgctgaacatctatggaaaaaaagcggaaccctacactgctgagctttgttttttaatagagggcatcagccagatttacctggaatgcatgattttgctcgggtacactgtgaagccgtctcaattagctgatatcattatgaatcgaattgatgatatggtaaaaggcatgtctgaacgaaacgataagcctttcatcacattggaagaggcgagctctttattcgggcctcttacgcacggacggcctgacccgctgactgaatcaattgtgaaaagcctacgtgacaaaattaacagcttaaacacaaactcctctcttgaattatcggagagcttggacatacttgaagcagaaatgaagaaaaaaacaccgaagcttgcgatcataaaaggaatgattcataatctgacggagtctgaagctctcgccaaagatgcggaacagcttaaatatttattaaaacagcaacatatttagaagaacggctgcttaaaaagcagccgttctttcttcctattacgcctttggttttaccatgtcttccggcttaaccatttcgttaaattgctcctctgtcagcaattcaagcttcaaagctgcttctttgagcgtcaatccctctttatgggcaagcttggcgattttcgccgcgttttcataaccgatatgcgggttcagcgccgtaacaagcattaatgaatttgacaggttttcctgaatggtttctttattaggctcaataccgacagcacatttatcatggaatgaattcatgccgtcactgagcagctgcacagattgcaggaagttgtaaataataacaggcttaaacacgttcagttcaaagttcccctgacttgccgcaaagccgattgtcgcatcgttccccatgatttgcgctgcgatcattgttaacgcttcgctttgtgtcgggttgactttaccaggcataatagagcttcccggctcattttcaggaatgacgatctccccgatgccgcagcggggtccgcttgcgagccatctgacatcgttcgcgattttcattaagtcagccgcaagcgcttttaatgcgccatgcgcataagtgatttcgtcatggcttgtcagcgcgtggaatttattcggcgagctgctgaacgtttggccggtcagcttagtgatctcttctgagacaagctctccaaactctgggtgagcgttgatacccgttccgacagccgttccaccaattgcaagcgcacgcattttatctgtcgcttccaaaatcatttccttcgaacggtccagcatgtgaacccatccgctgatttcctgtccgagggtcagtggcgtagcatcctgaagatgcgtgcgtccgattttgacaatatcattgtatgcttttgctttttcatccagtgtattgcgaagctgatcaagcgccggcacaagctgctcgtaaacagccaaaacagcggcaacatgcatcgcagtcgggaatgtgtcgtttgagctttggcttcggttcacgtcatcatttggatgaatcgtttgatcagagttcttctcttttaataaagcagtcgcacggttggctaccacttcgttcatgttcatattgctttgtgtgccgcttccggtctgccatacgacaagcgggaagttgtcatcgtacttgcctttgagcacatcatcacaaaccgctgcaatcgcttctgctttttcagcgtccagattgccgaggcgtttattagctagagcagtgcttcgttttaaaattgcaaacgccttcacaacacgcatcggcattttttcagaaccgatcttaaagttctccttgcttcgctgtgtttgggcaccccaaaatttatcagcaggaacttttacttctcccatggtgtctcgttcaattctgtattccatttatgtatccctccataacggttgcttcaatagatcataattcgccaatgacacaaaaaatcctttttatttttcgatcttggcagattttaattttaattcaagatatacgcgggaatcctttgaatatttgtattttggatttgtcctgccgtactcctttgatgtataagagacatcataatgctgttcaaatgatctaatgagctgttcaatttcttcttgttttccagctagccttacctgtgccacttcgtatcctccgctttcataaaaaaacttactccatgaaatactctaacacagtatatcatttttttaacaggaaaagataacctctactaaggttttggataagaggtgacctcattggaacaaacagagtttaaggaatatatacacgataatttagcattggtgctgccaaaattaaaagaaaacgatgatctggtgaaaaacaaaaaaatgcttgcgaacggactggttttttactatctctatttcagtgaaatgactgatgagaataaggtgtcagaagccattaaaactttgattaaagatgaggagaccttaacgcttgaccaggtcaaaaaacgccttgaccagcttgacgcaagacctgttgaaactgcaaaaaaaacgattgaatcgattctcaacggcaattgtgctgtgtttatcaacggattggataaagcctatattctgaccacaggaaagaaaaaaacaagaagcctgacagagccgacaactgaaaaagtggttcgcggcccaaaagtagcgtttgtagaggatattgatacaaatctcgctctgatcagacaaagaacctctcatccgaaattgatcaccaaaaaaatcatgatcggcgaaaacaagctgaagcctgcagccattatgtacattgaaggcaaagcaaaaaagtccgtcataaaagaagtgaaggcgcggcttaaaaatatccagctggaagatatccaggacagcggaacgctcgaggagctcattgaagataataaatattcaccatttccgcagatacaaaatacggaaagacctgacaaagtatcttcagccctgtttaacggccgtgtggcaattttggtcgacagttcaccatttgtgctgctggtgccggtttctctcggcatcctgatgcaatccccggatgactactatgaacgctggatttcagcatctcttatccggtcgctgcgctttgcttctatctttatcaccttgtttttgtcatcgatttatatagcacttgtttccttccatcaggggctgctgccgaccgcactcgccgtcacgatttcggcgaacagggaaaacgtgccgttccctccgatatttgaagccctgctgatggaagtaaccatcgagctgctaagggaagccggactgcgactccccaatccgctcggacagacgatcggcctcgttgggggcgtagtcatcggacaggctgctgtagaagcgaatctcgtcagttcgattatggtcattgtcgtcagtgtcattgccctggcatcctttaccgttcctcaatacggaatgggtctgtctttccgggtgctgcgttttatttcgatgttttccgccgctattttagggctatacggcattattttatttatgcttgtcgtttatacgcacttaacgagacaaacgagctttgggtctccgtatttttcgccaaacggattctttagcctgaaaaatacggatgactccattatccgtctcccaattaaaaacaaaccaaaagaggtgaataatccaaatgagccaaaaacagactccactgaaacttaatacctttcaaggtatttctattgttgcaaatacaatgcttggggccggacttttaacattgccgcgagcgctgaccactaaggctaatacgcctgacggctggatcacgctgatattagaaggtttcatttttattttcttcatttatttaaacacgctcattcagaaaaaacatcaatacccttcactctttgaatatttgaaggaagggcttgggaaatggatcggcagcatcatcggccttttaatctgcggctatttcctcggcgtagccagcttcgagacacgggcaatggctgaaatggtgaagtttttcctgctggagagaaccccaattcaagtcattattttaacgtttatttgctgcggcatttatttaatggttgggggcttaagcgatgtgtcgcggctgtttcccttttatttaacggtaaccattattattttgctgattgtgttcgggatcagttttaaaatttttgatatcaataatttgcgtcctgttttaggcgaaggccttggacccattgcaaactcccttaccgtcgtttccatctcttttttaggaatggaagtgatgctgtttcttcctgaacatatgaagaaaaagaaatacacgttcagatatgcgtctctaggatttctgattccgattatcttatatatccttacgtatattatcgttgtcggagctttgaccgctcccgaggtgaaaacgctgatttggccgactatttctctctttcagtcctttgagcttaaaggcatatttattgaacggtttgaatcctttttactggtggtctggattatccagtttttcaccacatttgtcatttacggatactttgccgctaacgggctaaagaagacatttggattatcgactaaaacaagcatggtgattatcggcataacggtcttttatttttctctctggccggatgacgccaatcaagtcatgatgtatagcgattatcttggctatatttttgtctccctgtttctgcttccgttcattctctttttcattgtagctctcaagaggaggattacaacaaaatgaaaatccggattttatgtatgtttatatgcaccctattgctgtccggatgctgggacagtgagaatatcgaggaattaagcttagtgatcggagtagggctagacaagcctgacgatgaaaatttagagctgacacagcaaattctcgtgccgaaaataatcagcgccaaggagggctcttcatctgatccgacacagctttctatcacaaagggtaaaactgtccatcaaatgatgagaacctctgcattaaagcataagcctacgttttcacagcatttgcgtctcattctgctttccaaaagcgtgattgcggatcaaattggaatggacgccattattaaccagtttgtcagagacaacggaacaaggaggagttcctacgtctttatcaccaacggccgaactaaggatatatttaacatgaatgatgaaggcgaacccgcatccaacgtgatatatgatctgacagagaataataaggtgacgatcagaacgatggagccagttacattgggggagatctcagaacacttaacctctgacgattcattcctcatccctcatgtcggtaaggaaaacggcaagctcgcgataaacggagcctctatcataaaaaataaattatggcaccgggacctcaccccgattgaggttcaaaatatcagcttattttcaggcactgtcgagggaggcgtcattgacttgaagcgcgatggccatctcttttcttatgaagtatattcaagcaatcggaagatcaagacggcatacaaggacggaaagttcaaattcaccgtcacccgcaatattgaaggtcgtctatctgaggactggaatcccaatgaagactcgtttaaggattcatatattaaaagtattgaaaagacagtcgaaaaacgagtacacgaaacagtaacgtcatttattacagagaagctgcagaaagagatcaaagcggacgtaaccgggctgggaaacgaggtcagaattcattatcctcaaaagtggaaaaagatttcaagaaaatgggatgatgattatttcagcaatgcggaaatagactaccgggtcaatgtgattgtcagagacttcggaacgaaaggcgcaaacaaatagcagccgcctaattcacgagatgatttcggtgcgcgtacaccgccgcctgcgtccggtcactgacatccagctttgataaaatattcgtaatatgtgttttgactgttttaatcgtaataaacagttcctcgcctatttctttgtttgtctttccttctgcgatcaggcagagtatttcgagctcccgttttgtaagcgattcatgcgggagcgcgttttcacctgagtggcgcagcctggataatacttttcccgccacttttgactccagcttcggctctcccttgcttgcggcgcggatggcatcggcgatttctgccgcttttgaggttttcaacagatagctgagcgcgccagcttcaataaccgggtacactttgtcatcatcaatgaagctagtgagcacaataattttcgggtcggaaagctcccggcaaatttgctttgtagcttcaatgccatccatgccctccatgacaaggtccattaaaatgacatcaggcgacagttccacagcaagccgaacaccttcgctgccgtccgatgcttcgccgatgacttcaatatcgggctgcgcctccaaaaaagccgcgagccccattctgaccatttcatgatcatcaatcaataatactcgaatcacgttcgttctctcctttttcttccggaaaaatcgggaccttcacttcgatttgagtgccttttccttctactgaaatcacttcggcgacaccgccgatttcacttgcacgttctttcatagaattcaagccgtatgaggaggctttcacctggtccattttaaagccttttccattatcaatcaccttcagacggagctggctgttctttatgcccagaatcacggttacttttgacgcttttgaatgtctaaatacgtttgaaagggcctcctgcacgattctgaacaagtggtcttcaacacccttggatatcgctgtgtcctgtatatcccactcaatatcaatcggctgcttttttcggaactcgtccaaaagctccgtaaggccctccttcagcccttttccttcaagggtaacaggccgtaaatggagcagcagcgccctcatctcattttgggcttcgcctgccatatgctcgaccatcttgatccgcttgactgttttgtcatcagcatccttgacatgttccagcacggctgatgtcatcatcgatatggcaaagagctgctggctgaccgcatcatgaagatctctagccaatcgctggcgttcttctgagataaccgacttcttcatttgagcctgccattccgcacgttcattggaaagtttctgcagggatgcgacttgaagctccacgcgcttcgccatttcgttcagctgatcagcggccaggccgatttcatcatcaccgagcggaggtatccgataagcgaaattgccgttttcaaaggttaaaatggattcaattaatgtatcaatccttgtcttcaaccggttgccgtacatataccctgaggcgaaaccgactgtcacgctgatcagaagcaaaatcaggataaacggaattccgaaccagcttgatgacagcaaaacaagcggatcgagccgatagtaaaacatcataaaggaaatcaggcaggcaaaaaggagcaggctgattcccgttgtcatgcggatggcgcgccattggaggctggcaagcattttttttctcatacgtacttcacatccacatcaccgataaataaggaaacggacacttttacccggcgctttgactcgctgaaatcagttgacgcggcatataccttcgtgcttaatccgcttttcttcgagccgatcagattaatgtcacctataaaaacagctgagctgacagccacttcaaggtccgatggtacataaatatcaacgttaccaatgactccgctaatgacgattgtactttctccctcgggaatcattgctttagataaatcgattttgatatcaccgataaaaccagagacatttaaatcattcaggtcaaacggctgcttcatcatttgcagctcaccgataaaaaagctgcgcatgtcgggatgttttacatcttttggcggatcatgatgttcttttttattgagattgacctgtttctcattcggttcaaatatcggcttccctttgataagcctgtagccggcgtaaatcagaaatgcggcaaacgcatagccgaataaattaaaggtgatgctgaagaggtttttcaaaaatagaaacgcggcaaagatatacatgacggagccaagccaatcacgggaatattttttaaggaaatagccggcaatcagaaaaaagagcggccaaaacagcagatcgcctattccgataatttgcaaaaacatactgatgccgaataaagcaatgatcaatccgagaagctgtttttttgtcattcctggtgtccgcctcctttcttctgcctagtgctaccgtatcgctagatccccgctgtccgttttgatgtcgattggatgctggccgcttccttgcgtgcctgtgatgtgatgctgttctttatgtgctttatcagcaaatgaatacggcgaactgacgtcaccgcttgctgataaagcattgactgcaaagctgccgttttggggaaggcttacattagcatcaccgcttgtcagcgtgacagatacgggaccggttacctttttcaatacagcattaaaatctcctgaagtcattttcacatcaagagagcctgatacatgaaccagatttgcgtcccctgaagctaaatcaatgccggctgttttggagacggtatttgaaatggaaacatcccccgatgatgccttcactttcagatcttgaatgcggacgtccgtcacgctcgtatttccgctcgcagatactgcgttcagcccggaaagcgcaagatggtcattcccggccacagacacgtcaccgcttgaggttcgtactgccagatcacctttataatcatacggaagcctgacgataagagttgaacggttaaatccattcaaaaattgaaattctttttcctttacggtcagctccagttttcttctgttttcagtaacaaataactttcctgagtctcctgaaatgcctgccgatatgtcacttcgttcttccgctataatccggacatccttgctatccgactcaatgaccatgctgtcaatgtcccgcggcgatgcgctggctgaatcagcttctgtgccatttatgaaacccaggcctgcagcaaacacatcttttacgacaacagcgaaaaaaaccagaataccggcagtgatcaacagtttgccaagcatttttttcattcggtttcatccttctcattcattctattataaaggaaaagcttgcgaattgatacgtgcggaaggggaaggacttgaccgcaaatccttccccgttccgcttattcatttgccgcttgtgtctggtctgatttttgcagtgaaagtgtccgcattttttcaatctccgcttctacatcgtctgcgaattctttacgtgtaagttctgtgccggcttccgctgactttgaataattcgcgcggatttccatttcttcaatacgattttcaatacgcaaaaattcacgatacgcgctttcactgtcaattttgtcaaatgtggtattcatatgctctttagctttcgccgcatttgcccgcgcaatcagcgcctgttttttatcctttacgtcctgaagctttgtttcaagtgcagccagttgctctttcagatcggccagctgactgtttgcctgttcataggaagctttatgctcagccgcctttccttctaaatacttcatttcagtcagcgcctttttcgccagttcttcttcacctgcgtcaaatgcgagctgtgcctgatttttccgttttccagccacttcagcggcttcttcatattttttcttaaattgataggcaatggtgtgctgtttcacaattgtttgctttgcttttgcgatgtcgctttccatatcgcgtacatattgattcagcatcacctttggattctccattttatcaagtccttcatgaactgacgcaacaaacatatctctgattctttttaataccatacctaattcctcctaatatattgatattattttttcttcaaaaattcttcccattcatcatcaaagtgagattggtaggcagcagaagccggttcaggatcaaaagatgatacaccgttatcagctgatccgtttttcatcagcttccagccgtaatacaccatagcggccgccaatgcgattccgacgacaaacggaagtgagcagatgagcataatggctccgataccgcccacgatgattcccgtgatggtttttcccgcggcaaaccttttgactcctgcgtatgtcatcaagctcccgatggcgagcgggatgataaagccgaagcttcctcctccaaaaaagacggatatcccaaatacaattaataagaatccgcctatagttttcttgttgatcttcatgcagatcctcctttcgttttccttgtcttcatcttatacaagttagaagatatgcaaaacgaatcagagattgatttttatataagaccggagtcgtatctcggacaggacccatcggcacaaaaaaacgccatgcacgaggcatggcgttttaaaaccctttacagatgaacacttgcttccctttctttaatcaggtcggacctttctgctttggccagttttgtaaacagcaagattccgatacccgcaataatttcgacaatcccgccggcagcaatcactgttcctgagccgaaagcattagcggcatacccgcaaatgacagctccggcagggatcgaaatatttgagatcatatgtataacggcgtaaacctgcggctgatcctcactatccacagacgtctggataatcgtgtactcaggaacattaacagcactgactgcggcaccaaaggtaaaagcagcgaaaaagacgagcggcaaaaaggtattcatccctgtaataaagaaagcaaatccttcaataatgccggcagtgacgaataacaagccgtacctgtttaccttgactttcgccagcacaaaccctaataaaaacgcgcccgcggcggtggtggcctttaaaagcgagtatacgatcggctggccgtttaaatcttccgcaacgtatacggcagagagcgcttcccatggggcagccgcgaaattcataaagatacagtaaatggcgagcggatataaaatctggtgttttctgacgagcctaaagccgcgtttcagtcttccgatatatgtgcctctctgtgtaacaaccgcagactctgattgagattcaaccgcagtgtacttaataaaaagaacgagaaaacctgacaccaaatagagcacaagtgcgataagcatggtataagaaggactaataaatgtaagaaaagcgccgcataatgtgacagccccaagccggacaatttgagcggaggattgcagcacagcgtttgctttttgaatgccctgttcattgacgatttgaggaatcaaagcgatagaggcgggattgtaggcagctccagtagctgaatgcacaatcataagcgtcatgacaaaccacagcggagagaagcccgcaaaatgacatagagggataatcaaaacaatcgccgcccttgtcagatctgaaaagtacatccaaaatttcagcgtggtctgtttcataaaaggccccgtcacaggcgccagaacggcttccggcaaaaacgtgacagcaatcaataaagcagtgccgatcgcacctttgccgtcataaattaaaaaccataatattgaattaaatgcgaacatatcgccggatatcttgactattcttgagaaaaacagataattgaaatttctcttccagatgctatcactttcaattaaattcaccatccatcagagccccccgttgcctattttttacatctatttattacaatatctcatttttccatttttcagtcaataattcataaggttcattttttgtcgtaaaatgggaaattgacagagtgaaaaacaaaaaaagccggcatgtatttgaacacgccggcttccttttcactttttatgattcgctgctgtttcggtcccgaaacacaatggcacttctttcatattctacatcgccaataccgcttcttgcattcacaacccgtgcggcggcaaagaaataatcggacagacgattgagataacgcagcactgtttcatgaatctcctccgatttcatcagcgccaccactcttcgttctgccctccttgtaatggtgcgggcgatatggagaagcgaagcacctcttgatccgcctggaagaataaatttcttcagttccggcgcttctgctgtataggcatcaatgcgcgtttctaaaaaggaaacagattcttccgttagtttgtagtcttttctttctgtgacgattgccagatcgcctccgcagtcaaacagctcatgctggatggtcagcagctcggctgtcagatcttcaaagccgggctgcccggaaagctctgccaaagcaagcccgataaagctgttaagctcgtcaatcgtgccgtagctttcgacgcgtaggctgtccttgtccgttctgcccccgactaagcccgtttgtcccttatcgcctgtttttgtatatagtttcataccctgaatctcctttacagacttattcaaacaactcagcagcctcttttacacattcagctgtccctttctttatcaattgattcagccgctgttctatgttttcggattgctgagtttgagtcgcggcgatgagaatatcacctgtgcctcctccgtctcccagcactttcgtccgttctgcttcggcagccataagagctttgatgaagaattgatctgccgcatagccgtttatcaaaatccaaatcgaaaagccggtctgaacgcatatgaaaacggataactctctgtcttcatacgttcgatacacgaaacggtcaagtctttctgaagaagccatcgcacacgtctcctgcagttgaaaaccgctttctgaaagacaggccgtaagtccttctatcggatctggctgatctggcagccgtttatggatcagcgtcctgctccacgaaaaccctgcaccgataggcgtcgaggacaatgttcgaagcgggatttccgtttgcagaagaatgtcatcacgccccgcttggagcaatgcttcaaatgggatagactgccgcttcacgctatctttttcaggctgaatcacaatcatcggtttaggtgagctttgatgaaccaaggcggtgacatctgtatcgtacaccgcctttatgctttgttctgtaacagcatattccggtttttgcttaggcccggcggtaccgtttttcataaacatgagcccatcacagtacaggcttgcggtgttcagatcatgaaaaacgctgacagctgccaatccgctttctctcgtcaggcgtttgatcagatcaagcaggtctttttgataagccagatcgagaaaattagtcggctcgtccaaaaataaaatacgcggctgctgcgccaaagcttgtgccaaatacacccgctgctgttcccctccgcttagttcgcgaatcggcttttgcgcaaaatcggccactcctgtttgctccattgcttcctgtacaatggcttcacccttttcagtctgctgtctgaacagccccgtttggaatggatatctgccaaaggctacagtttcttcgacagtaaaggtgaaggcttgatccattttttgcggcaggacagccatgatttgcgccagttccttcggtttatagtccgccagcagttttccggccagataaaccctgcctttcttggccggcagcgtacctgtcagcaagtgcaaaagcgtggtttttccgcttccattagggccgagaattccaagaaattctcccttctccactgttaagctgacattgttgattaggcggctgtcgccgtatcctcccgacagcccttctgccttcatcataagcttctccccccgcgatgctgccgaattaaaataagagcgaacacaggcgctcccgccaaggacgtaatgatcccgatcggcagttcaatcggctcaatgatggttctggaaagcagatcggctaaaacaagaaaccctgccccaagcaaggcggacaacggcagtaaatgccgatggtccgttccccacaaaagccttgtgatatgcggaatcacaaggccgacaaagccaatcgtacccgatactgccacagcgcttcccgtcaaaagagatccggctattaaaatcatcatcttcctctgctgaacgctgactccaagaagctttgctttatcttctccatatgtcatcacgttcagttcccttccgtttataatcaataaaatggttcccaaaagaaaaaacgggagaaacaaaataacatagctccagcccctcattgagacgctgccaagcagccaatgcacaatcggaagcaggttgtctcctgtcaaggcgatgataagagaaataaatgcgcctaaaaaagagttggtgatgacaccggtcaaaatgagggtggaaacagacatcgaagcatgaacgaggcggctgaagaaaaggaccgccgccatcgtggccagtgccgcggctacactcaaaaccgggagtgtaaaccctccgatgacaggaaggtgcaaacctaagaacagagtcacaacagctccgactgaagcaccggatgacacacctagcgtatagggatcagcaagcggatttttcaacaatccttgaaaagcggcccctgcaatagaaagagccgcccccacaagggcggccagcacaactctcggcagtctgatattcatcataatattagtgtacatcggatcatcagaaccgatagagccgccgaaaccttgatgccaaaagacacgaaaaacagcgggaataggaatatgcaggctgccgcaagaaattcctaagatgatgctcacggctaaaaatgagaaaccaatgatatatgcggcataacgattattccttaaacgtatccgggtaaatgctttccgcaagttcttcgaccccttcgatcagacggggaccggaacgtgtcacaagatcagggtccacatcatatacacgatgatgtttcacagcattgatttcgctccagccatcgcgtttttccacagctttcgctttcacaccgtccgttgtaacaattgcatcaggattgagttttacgatcgcctcgtctgtcatttgcacccatcctgtctgatccgcagctgcgtttttagcatggatgacatttagcatttcattcataaacgtatcttttccggttgtataaatgtcaggatcaggagaaacctcgataaatacgcttttctcctcgtcttttgaaatggttttcgctttttcttgaatatcctttagatctgatttcatgcttttcacgagctgatcggcttttttctccgccccgccagcttctccgatcatttcgattgatttgtacacctcggagaatgattgtgcatcattgacagtcagcactgtaatgcccgcgtccttcagctgtttgatggcatccgctgatgctgacatggaagactcatgggccagaacgagatctggttttagagaaatgactttttcaacgtttacattcatatctccgactttctcaacctttttgacttcctttggataggtatcgtttgtggtgacaccgaccactttgtcaccaaggccgagtgcgtatgtaatttctgtgttgctcggcattaatgaaacaatcttttttggctcttttttgatggttacatcttggtttgacgcatcatcaatggtgacagggaacacttctgttttttgttttgcctttgaatccttctgatccgcaggattgccgcagcctgccagcataacagcagccaacagaagcgcagcccatatcccggctcgttttttcataatcttttcctcctaaacgaactaaaaaagcatctctacgacggtaaagatgctgtaaacaacacaaaaaagcctattgtttacacatcatctgtcctcgcagaattcgtgctgatcaaacaggcaggtatcctggctcttggcgcttggccaattacagtggcgggaccgcaccggcttttaccggtttcccttttaagccggctgttgttcacggaccggcacctatttgacattcgtatccgtttttcggagtaattatactatatgactgacaggcttgtatatgtgtcctgaatgacttttccccatattgtgtatggaagcaaaatcctcgtaaacactaaatttgatcttgtatacttaataccatcatctatcaaaaggaatgattcttatggatttacagctaaaagaaaaactcgtcttaatcaccggctcgacgtccggtatcgggaaagccgccgcaaaaagctttctgcaagagggtgcggcagtcattgtcaacggacgcaaacaggagactgtcgatcgcaccattgaagagctttctggctatggaacagtgcacggtgctgctgccgatttgtcaaaaacagatgaagcagcggcttttatcgaaaaagtaaatgaaatcggtgatatcgatatccttgtcaacaaccttggtttcttcgaggtaaaagacttcgccgatgtgacagatgaagagtggaatcaatatttcgaagtgaacgtgatgagcgccgttcggacaagccgtcacttccttccaaaaatgcttgccaaaaacagcggccgcattttaaatattgcaagtgaagcaggcgtcaaaccgctgccaacgatgattccatactcaatgacaaaaacggcactgatcagcctttcaagaggaatggctgaaatgacaaaaggcacaaatgtgacggtcaactcagtgctcccgggacctacttggacagagggcgtggcctcctatatggaaggcgccgcacaagcagccggacaggatacagatacatttatcaaagactatttcaaggtcaatgagccaacctcacttattcagcgatacgcgacagcagaagaagtcgccaacacaatcgtattcctcgcgtctgacgccgcatccgccattaacggcacggcacagcgtgtggaaggcggcattatccgttctctgtagtataaaaaacgcatccgttgtttcggatgcgttttttttatacgtctccagcaaatggtaccggctgatatccgcctgtttccagttgtgctgaaaacaaccctccagcgtgaggctgctcgtatctctctttttctgtcatttgttctgttgccgttgtaatgtaaagggtttttaagtctttgccgccgaacgcgcagcacgtgacatatttagccggcacgctgattgaattgatttcttttttctgaaacgggtcaatgtgaacaacgcggctgccgccaaacagcgccacccacagcatgccattttggtcaattgtcatgccgtccggcaatccgtccgactgatcaaaacgatagacaggttctggattcgaaacatccccgctttgaggatcatagctgtaacgtacaatctcctgggtcggcgtgtcgatgtaatacatcaaattccgctcgcggtcccaatccaaaccgtttgaggtggagacttgatccttgattttgacaagactgccgtctagattcaaacggtacagcgacgcctgtttttgctcgccttccatgctcgtcgtccccgcccaaagccttccgtacgggtcacatttagcatcattaaatctcaggctctcatgcatgtccttcggctgtttaattttttccaagctgtcatcccgaagatgatacaggtaaaacccgtccttcatcgtcataatcagttcatcctttgaatatttcgcaagcgccgtcacaaaggatttgaatttgattgatcggttgattttttcttcagggtcaaagatgtggagctcgctccccaggatatcaacccaatataagcggccgttttcttcatcccataacgggccttctccaatcactgcccgagtgtctgcttccaatactgcatccatgtgttacacctctttagcttcagtctatatattgttattcccggcaaagaggtgtccaaaccacttgatgtttattgttttttaaaaaggatggtaatgaccgttccaatgttcattctgctgttcacatggatcgttccgttatgcagatggacaagctccttggcaatcgcgagcccgagacccgttccggcagttgaatcttttgtgttcgtccctctgtagtaacggttaaacaaatgggtaatcgtttcttcatccattcctttcccattgtccttcacctttaaagatatatgattttttgtttgctccagaatgacttgaatctctgttcctttgtcgttgtgcttcacggcattcccaaggaggttttctaatatgcgcctgaaccacgcttcatcaagggcaaattcaatatgctcttctttggatacaaacgagatatcatagccttcagaaaacggatttttcttaaaatcctcaatgacatttttaaaaaacgggataaggctagtgagatttctctcaataggaagagcatcatttttcagccgatacgttaaatttaagtcttcaatcagcttagacatgtattcagatttttctctgacaacctgccccatttctttcacttcttccggcgaccagtcatactgcttcgactcgagcatcatgctgtagccgtaaatgctgctgagcggtgtttttaagtcatgtgacaaaccggcaatccattcttcccttgtcgcctggattttttctctgtttcttttatcccttctcagcgtttcagtcagctgatccattgattcaaatatctcaccgaagaagcggtacggctgtttgatttttccctttttatttttgctgacaggacggccttcccggtttctaggttcctcaagcttcccttttgacagattgaccagccatctaatcgtgtgaaaaatcggcagcccgaatcggaacatataccaaacggtcatccaaatgatatacatgaacaaaacggccatcacgagaaacatcgcttttaatacaaccttcaggaatgatttgttaaactcctgatcggttacatagactgggtttggcaccgtagcgaccatccatctgtctttattgaggatcttaacggaaatttcccgcttatagttccaaggcttagagctgtatttaagcagctccagctggttcatcgtttttctttcgctttttgtgctattgatgctgtcgagaatctttccattgctgtctaacaggtaaatggcgccttttttccgtttaatatagtcgatggtactagacttatagtgcgctagtgagtctatcttttgttcacgcttttcaacggaagtcaggagctgttcactttttgatttccagccggacaatagaagatacgacttatcttcaatattgatggcccaataattcagtttatagttatgaagctttttggttttataaatagacaaaagctctttcttggtataggtgcccggcacgtcttttggcacgccgtaggaataatcagtgtttccttccgaatcaatgatttgcatccagccgtgctgtttatcaacagatttcttcaggaaattatccacttcccatgtcccgtcttcgtttacatcgagatatgcctcaagtgtgtcggtcgttgctttcgtcagccctgaattggattccgcatcgctaaaacgggcgtctaaatagaaaaacgatgcaacaagcataaccgtaagcagcaggatcacaatcagcatctggccgaaaaagtgaaacaaaaacttccatcttaacctcatgaccgcttgccttcaggatttgggataaaacgatagccgagacctcgaacggttacaatatactccggattgctcggatcgcgctcaatcttctccctaagcttgcgaatatgaaccatgacggtgttgttgtcaccgtaggaaggatagccccatactttttcatatatttgatctttggaaagcaccacgttagggtgttcacaaaaatactgcaaaagctgcagaagctgggctgaacaggcaacggcttccccgcctacgatcaactcggcattttgcggagaaaaagtaaagtaatcatatgtgtaggtttgatttgaactcgtttctttcgattgatatgtacgcttgagatgcgctctgatccgcgccgctaattccagcggattaaatggttttgtgatatagtcatcagctccaaccgcaaagcccgataatttgtccgcgtcggatgatcttgccgtcaggaaaaaaatcggagcgtctgaatactctctgatcaatgtgcaggcttcaaaaccggacattccgcccatcatgacatccagcacaatcaagtcaaccttattggccttcacaacgggaatcgcttcttctgcgcttgccgcatccagtatatttcgataaccttctttttcgagaacgcgtttgatcatgtccacaatcgctttctcatcgtctacgattaaaattgacgcattttccacttttatgttcctttctgtcactgtttttttcatcttatcattatatcgtttatttatggtacatttttgaatacattggagcttggcaaatcaaaacagcaaaaaaggagcaaacaagcgctcccttttgatgttttttcatatgaaaatattatgagttctcatctaccatgtacaaaataaactcccaaaaccccggtacatcctgacataaaagcatatcagccttttcaaacattttgatcttcagctcttgctctaaatcttctctttcttgataggacgtattgctgagtttttttctgatcatcggtgaaaagcatgcaatcaggtgctcaatgtcataagtctcgtctttttgtttctttttttgttcaaactggccgtccacagcttacttttccccctttttttgcgccgctaactgctttctgatattctccagcccctttttatgaatgttggagatgttttgtcgggactcccctaatgaatctgcaatctcctgcatcgtggcaccgtgaagatagactttcgtcagcacacttttttgtttgtcagtcagcttctggatcgcttggtagagctggtaatcctgtacatgctggctcaaatcatcctgcctgtctaaaaattcttcaaatgcatcgctacctgtttcggaaggaagccgatctcccgcctccggatgatcaaccgtcagcggataccgtttttggtttttgcgaacccgcttatcaaaatcaatagaaaagatgcgaatcattgaattcatatacttgacgatgcggatttctttataaaattgcttaaatagctcgtccaatgatcttgcatctttttcgttagggctttccattacgtttttgaacaaacggtaatgctgaggattgctcaaaaaatgcttcacgatgggatgcttcattatctccttacattttgaccgtaaaagactttgatagtccatcaaaccgcctccctactaaattaaatgaaggaaagcaaaaaaaagtaaactactactttccgcctagtgtcttccaaaatactttgcagcagtttacgttttatcggttttcctcacttacatacatgactgcagaaaaagaagggaggtattttcctatggatcaggtttttatagaggaagtcgtaaaacagatcggcaatttggggtttcccgcgctgattgcaatgtatctgctgacccgattcgaaaagaagtttgatcaactaatagaactaatgacagaaatgaaagatcatgcaaaaaaataatttttcaatcgaagttgacttttcactggtttttttcacttaacaaaacagaagggaaaacgaaaggcctttcaccttctctttctgctatcacatttaaatgtaaggaggaaacatttcatgaaaaaacaaaatgacattccgcagccaattagaggagacaaaggagcaacggtaaaaatcccgcgcaatattgaaagagaccggcaaaaccctgatatgctcgttccgcctgaaaccgatcatggcaccgtcagcaatatgaagttttcgttctctgatactcataaccgattagaaaaaggcggatatgcccgtgaagtgacagtacgtgaattgccgatttcagaaaaccttgcatccgtaaatatgcggctgaagccaggcgccattcgcgagcttcactggcataaagaagcagaatgggcttatatgatttacggaagtgcaagagtcacaattgtagatgaaaaagggcgcagctttattgacgatgtaggtgaaggagacctttggtacttcccgtcaggcttgccgcactccatccaagcgctggatgagggagctgagttcctgctagtgtttgacgatggatcattctctgaaaacagcacgttccagctgacagattggctggcccacactccaaaagaagtcattgctgcgaacttcggcgtgacaaaagaagagatttccaatttgcctggcaaagaaaaatatatatttgaaaaccaacttcctggcagtttaaaagatgatattgtggaagggccgaatggcgaagtgccttatccatttacttaccgccttcttgaacaagagccgatcgaatctgagggaggaaaagtatacattgcagattcgacaaacttcaaagtgtctaaaaccatcgcatcagcgctcgtaacagtagaacccggcgccatgagagaactgcactggcacccgaatacccacgaatggcaatactacatctccggtaaagctagaatgaccgtttttgcatctgacggccatgccagaacgtttaattaccaagccggtgatgtcggatatgtaccatttgcaatgggtcattacgttgaaaacatcggggatgaaccgcttgtctttttagaaatcttcaaagacgaccattatgctgatgtatctttaaaccaatggcttgccatgcttcctgaaacatttgttcaagcgcaccttgacttgggcaaagactttactgatgtgctttcaaaagaaaagcacccagtagtgaaaaagaaatgcagtaaataaaagacttgcggcttgcagagagcactcgttctctgcaagccttcataaggagctgaaccagtgaaacatcaaaacccttcaaaacgcttattgcggctctccataaagtacttgctggccgcagcagcagtggtgttgacctattttgctgtcatctatatattgttttctttagcgggaacgagctaccgctcagcagctcatgtcctgctttttgccgtggtatttcttgttctcggattatgctttgaaccatttgaaaggctgatgatacatagctttacatttttcaagacaggaaaacgtctattcattctccttgccggcatcgtacagctgctatttttgtggatgactgctcatacaacagaccaattgatcagcgacatctggctgtccaccacagaagaaatgattgtcgcagccgtttttttgattttagacaaatgcaactcggctcttcccagctaaaaaaagaacgcattccaattggatgcgttctttttattcatagcgaagcgcgtctacaggctgaagcttcgaagccttgatagacggaagcaagccgaagataatgccgactgccattgaaaagatgagtgctccgacaacagctggaatggagacgataaaaggcatcggaaaaatgaccgtcagcagcttggcgatgccgaagcccgccagcacaccgagtattccgccaatgcttgtcagcacgacagcctcggttaaaaattgaaataaaatcacacgccgcttagcaccgagcgctttcttaattccgatttccctcgtgcgctccgttacggaaacgagcataatattcatgacgccgataccgcccaccaaaagtgaaatactggcgattccgccaagcagcaatgcaaatgactgattaaaggactccacttcctgcgcgatctcctgaagatccattacactgtactctgctttttccagctcagcttctgacagtccctgatttaaaagatctgcagccattacacccgcttcttggatatgctcagaagaatcagcctgcacggcaatctgtgttggcgcgtcaaacccttcaataagcggccacacttttttcggcacgtacaaaaccgggttcgcatagtcgccttcaaacatgctttcctgttgatttttttctttaaaaacaccgacgaccttaaacggcacaccattcatctcaatgtttttatgcagagcttctccgtctggaaacagttcatctctgacagcttcattgatcatcactacttggtgtgtgctgtttaaatcgttttccgtcagctttctcccttcggttattcggattggaaacatgtcgaagtaatcatcgtccactccatacacttggggatacgaaacgtttgttaaatgaaaaacgctcgcgccttctgacaagtaatataaggataatcctttgaccatcggatctgatttgatcgcctttactgtttcttccgctacaggcggcgcggacgcatacgacacctgagggccgccgctctcctcttctccgccagacggctggtagacaacgttgatcgcgttgtttcccatgccgatcatactttgctttaattgctcactttggcccttcagcattgaaacaatcgcgatgattgccgctatgccgataatcacgccgagcattgtcagaatcgatcttaatttatgagaaaaaatggattgaaaggagattcgaatatgttcaagcatggctgatatcccctctctcatctaataccagctctccgtctctgataaaaacggttctgtcagcttttttggcgacgtccgggtcgtgggttatcataataatggtcttgccttcccgatgcagttcagaaaacagtgacaaaatttgttcacttgatttggtatcaagcgccccggtcggttcatcagctaaaataaacctcggctgattgacaagggccctcgctatcgccacccgctgcttttggccgccggacagcttaggcggtttgtaggagaccctgtcttttaatccgaccttttccagcgcttcatatgcccgttgccttctctcttttttcttcactttattgtagatcatcggcagctcgacattttgcagcgcggtgagacgcggcagcaaatggaaagtttgaaacacaaacccgattgattcattgcgaatttcggctaaagccccgtctttccctttcaatatatcgatctggtcaagcgtataggttcctgaggttggcctgtccaaacagccgataatattcattagcgttgactttccagaaccggaaggccccataatagctaaaaactcccccgcctgaacagtcagattgatatgtttcaagattggaacttcttcttttcccagcttgtacgacttcgaaatattattcagtgtcagcattgactgtaacctgctttccttccttgaccgcgggatcaggatagatcacataatcttccggcgtcaggccgctcttaatttccaccatgtcattttcatcagtctctccgatttcaacaggctgcttaaccgctttgtgattctcatcagctttccatacgtacggttcgccgtcatcctgaatgaccatgtcggacggcagcttgatcgtgtccgcatcagcattatcactcatcacttcgatgttgacatgatagccgacttcaagacctttatggctgtctaataaaatggtgaaaggatagttagaggactggggattcatttcttcatcagcaaagctttctgattcttcaccctcgcctgctcccgctggaagcttgccgatcgaggtgacctttcctttccactcgccctcaccgcctgttttcagcgtgaccctgactttgctgccttttttgatcgtgtccattaacagctcattgatttggcttttgaccagatatttgcctgtcgaaacaatctggatatacgggcctgctgcctggtcgcctgttgcaccgtcagcgatatcctgattgacgctttgaacgattccgtcatgcttgcttgtaatgacattggaacctttgtttttcgtcaggccagccagttctttttgatgctgcttcagttcaagctggcttgttttcaaatcgaaattggcttggtcaagttcatcttgaagctgggttttctcttctttccctgcaactttcagcttcttttccgtttccgttattgatttttgcaaacggttgatttgcagatttgtcatttcaatttgcaaattggcttgctccacttcatcagaatgatcctcgccctcatactcaaaaagcttatcgccctttttaacctgatcgccttctttgacgtatgtttttttaatgctgcctttttctgaatctatgtatactttctgctgtttctcaggttcaacctttccagaaaacgtttggcctgattctgaatctcctcccatgtataccgcgaccgattcagcatagggctccgatgatacggcaacttggttcatgtgagtaaaaaagtaaaaaccgccagcgccgatcccagccaatacaagcacaccggcacatatcgcaccgccaataagccattttttcttcttggacacaacgatctcctctttctgtaaactatgtaatattttcgaaacattctaaccaatattatctattaattcaaaaagacttgcaatccttttattgaaatgacggaatcaaatagaaaaattgtattttccaagccgaataaaaaaaatcccggcttcaaaccgggattttttcatacagtaactagctctttttcatttttaatcaagtcatatgtcaagcatacaggtttatttgtacggggatcagtcacgatttcggcatcaatctgaaatacctgcttcaaaatgtctggtgtcatgacctccagagcagttccttccttgatgaccgtgccttttttgagcgcgatcatataatgagaaaaacgagctgcatggttaagatcatgaatgaccattaaaatcgtccgcccttgctctttgttgagtctgtcaagcagctgcagaatttcaagctgatgtgcaagatcaagatacgttgtaggttcatccagcagaagcagttccgtcccttgcgcaagcgccatggcaatccacacgcgttgacgctgtccgcctgacaatgcctcaatcggccgttcagcatattcagccatgcctgtttcttcaagcgcccatttgataatccgtcggtcttcgtcatttaatctgccgaatcctgattgatgcggaaacctgccgtacgacaccaattcgtgcactgttaggccgctcggcgcttcaggtgtctgtggaagaatcgccatatcttttgcaatgtcctttgtagacattttatgaatcgctttgccgtttaaatagacggcacctgcatgtgaacgcataattctggacattgtttttaaaatcgttgatttcccgcagccgttcgggccaattaaggtggtaattttccctttaggaatcgatatatttaaatcctctacaatcgccctgtcgccataaccgattccaagctgttccgttgataatgaattcatattcggccccctcctctaattcgctttcatcaataaataaataaagtaaggcgcacctagcacggaaatgacaagtccgaccggaatttctgatggtgccaatacatttctcgccagcgtatcagcaagcaaaaacaggaatgagccgatgaaggcggagaccggtatcagcgtctggtgacgtggaccggtcagccttctagccacatgcggcgcgatcaatccgagaaacgcaatgccccccgcagctgccacgcatgaagcggcaagagtaaccgctgccagaagaagaatccgtctttccttttcaacagcggtgcccagcccggtcgccaattggtctccgagctgcataatgttcaaatagcgtgccttatataaagtaaacagaagcaagatcacaatccaagggagaatcgcccagatcatattccagttcgccccccatattgagccggatatccaaaccgcggcttgcataaaatcatgagggtccatcttaagctgaaaaatcagcaacagggcattgaatccggcattcacccctatgccgactaaaatcagccgaatcggtgtcacgccttttttccatgccagaatataaatgagaaacgcagcgaggattgctcctgccaaagcactgaatggcagcataaatgttccgaaaaagctgagatctgaagctgacccttgaaaaaagtatataaaaagcactacagcaagtgaaccgccggcgttaattccgagaataccaggctcggcaagttcattttgagacacgctttgcaaaatggctccagctacggagatccctgctccaacaagcaaagaaaggatgatccgaggcagcctgaactcaaataagacaagttcatcacgcgccgttccttggccgaaaaagacctgaagcgttttaagcggtgcaattttgataacgcccaaattgagactgataaaaaagaccaccacgataagcaaaaaggtcacagccattacaataagcggtttgtttgtttttgttttcattacagccctctcctttcacgacgtgccaaataaaagaaaaagggaacgccgatcagagaagttagcgcaccgacaggcgtttcaaagggcgcatttacgagtctggccgctatgtcagcaaaaacaagcaaaacagcaccgagcaccgccgagcaaggaatgatccaccgataatccacaccgaccaaaaaacgggtaatatgcggaatgatcagcccgataaatgcaatggtgccggcaatggaaaccgcagctccggtcagaattactacaataagcatgcccaccagtttcactgctgatgtatattgtccaagccctttcgccagatcgtcaccgagacttaacactgtcacagatcgggcgataaaaaacgcgagcgttaaaccgacagcccctgcaataagcaaaagctggacccccgaccatttcacacccgctaccccgccagcgtaccaaaagctgatatcctgagcgacatcaaagcggattgcaatggcagttgaaatgccggtaaagaaataagtaactgccgtacccgccagagcaagctttacaggcgtaagtccgccccttgaaaacaagccgatgcccattaccgtcgatgcccccagccccgctcccgcaaaggaccatagcacaagccccattgcagaaagtccgggaaaaaaggcaaacgcaatcgaaaccgcaaacgcagagcctgatgtcacacccataatcgaaggctctgccaaagggtttctcgtcatcccctgcatgattgctcccgacactgccaacaatgcgcctacaagcgcggcagccgccgttctcggaagccgaagatcatgtataatttggtgagatgtctttgtcggctgataatgaaaaatggcgtcccatacagtgcgcaaatgaatatccgctgcaccgagggatatggataaaaatgcgccaaggcaaagcaggcatagacctgcaataaggacgatgaccgcgccatatgtccttgacgtccattggatttcttctgatgcagtccgtatatttttatgttgactcaactgccgtacttcctttctgttactgataatgattatcaattgctgtttcagtatatcacttttttcagctgatttaatagagtgttttgaacaaaaatgaaaatgcatttgcaaaaatatcgtgtcaaccggcacttgcagtggtataatcacagatgataatgattctctttttcatctattttttagaaagaaggtatgagatatgacccatatatacaagaaactcggagccgcgttttttgccctgttattgattgcagcgctggcagcctgcgggaataactcagaaagcaaaggttctgcctctgattcaaaaggcgcagaaacctttacatacaaggctgaaaacggaaatgtaaaaatcccgaagcatcctaaacgggtggttgtcatggcagacggctattacggctacttcaaaacactcggcatcaacgttgtcggtgcgcctgagaatgtatttaaaaacccttactacaaaggaaaaaccgacggcgttgaaaacatcggagacggcacttcggttgaaaaggtcattgatttgaaccctgacctgattatcgtctggacaacacagggcgctgatattaaaaagcttgaaaaaattgcgccgactgtcgcagtaaaatacgataagctcgacaacatcgaacagctgaaagaatttgcaaaaatgacgggaactgaagataaagctgaaaaatggctggccaagtgggataaaaaagttgcggccgctaaaacaaaaatcaaaaaagcggtcggtgacaaaaccatttccattatgcaaacgaacggaaaagacatttacgtattcggtaaagactttggaagaggcggaagcatcatttacaaagaccttggcctgcaggctacaaagctgacaaaagaaaaagccattgaccaggggccaggttatacaagtatttcattagagaagctccctgactttgccggggattacattttcgcgggcccatggcaatcaggcggtgatgatggcggcgtttttgaaagctccatttggaagaacctgaatgccgttaaaaatggccatgtctacaagatggatccgatcggtttctatttctctgacccgatttcattagaaggacaactgaagtttattacggaaagcttgactaaataaacaaaagagccgcctgcccgcggctcttttgcaaatttataaggaacagctcaatttgaatcatatcagatattttctttgagccattcatattaagctgcatcctcatcgcgatcagtttttttatgctggagagactgaaaaacgttttttgcatattcgattgtgccttaaagtttttctttcgatttcagctttcctgtcagctaggttaacgaacggattcttaacagaagaaattgtgattttataaaaaagacacctgagcaaatcaggtgtcttttcattatgcttgtttttctttctggaactttttactcacaaatgtataaacgattaagccgacaaagaataaaccgatgccgaggataaatgtcgttaaatctgctgtgcctgttacgataacaaacacggagtatgcacacgccagtatcgcgatcaatccgtctcttacacgggagcctttcagctggtcatacgtttcacctttgatgactaccttcaagctgtagattgcagataccagatacggaattaaatatgcgagtgtagccgctgtcgttaaaaatgtaaatgcgtcacttattgtccgggaaataaccgagaaaatgaagacctgtgacatgacgtttgtaataatgagtgcaatgaccggacttccctttttattcgtttttgcaaaaaatgccgggaaatctcctgctttagcggcttggtatggcacctcagagccaagcaaaatccagccgagcatcgttccgaataaacaaaggatagccaaaagcgccataatcacgcttcccgcgtttccaacaatcgcatagagtacatcaacaaatggtttttcagagccgacaagcttatcatgcggcagaacacccatcgtaattaaagtcacaataatatatatgctcaaggcaatcagcaagccggtaattgtcgcacgtttcacatcacgctgagagcgcgcacggccggacaggatcaccgcggattcaattccgacaaacgcccacagtgtagaaatcgcggcgttatgaacctggccgccaattccaatgcttgtgccgttttctccttgaaccgggaaataaaaatgaccgaataatgtcgtttgaaacacaaacaaaccggcaacgataaagaagacaaaacctaatactttagaaagcgttgtgacaaagtttaatttacttgcgccgttaatgctggcaacaagaatcgcgtgcgttccccataacaagatcgtacatacggcaaacgtcagtaattggccgagtgtcacctcttgcccgccgatcgaaaacatctcacgtttatcaaccaagatcgggaagaacgaagtcaagtaaccggcgagacttgtgatgatcgccacgttgctgatccagctcgccacccagtagccccacaccattgtgaaaccggcagcgttgccttttttcgggtcagaaaacagcgctcttgcataactttgcggtcccgctgtcagttcaggcttgcgaatggacaagtgtccgaacacaagtgcaatcatcagcacgccggcacctgtcaaaagccaggcggacgtagctccaaacggactcgcaattgaagcaagcgagctcggcaaggagaaaattcctgatccaaccatatttccaacgacaaacgccgttaataaccaaaaaccccatttttttgtctgttccattccagtacctccatgattctttgtacggaccagaccccgagatcatataaacgcaaaaaaagcctgaacaaaagtccatgcttaaagaaacacacacccttgatctccggatagccctccgcgaaaaagcacgcggcagtcctgcacttattcagatacagtcccagcatagagaaggatcggctttctccacacttcggcgctgatgccttttacacatgtttaacagcccctgtcagcctggcatgtgtgacttatcatccgcgcaacctctacctcactgagaaagagtgaggatttaattattcagttactcccagaaggttatcaaagaaaggatgatctgtcaaagggaacagatggaaaatacggatagagccaagccctatccgcatgtgattatcgattatttttctttttttgcacagcttcttgaagcggatcatcttttagagctgaaccagcatcttcaagagctccttggattacgtttttttctttttcggaacgttttcctttatctttattaaagaaacccattcgtatcacctcttttaaaaaataggtacatgtttaagatgcctcttttatgaaaaattatgcgggatattttttatcgtccaaagtcctgttgatcaaacatacattctcttgatatatttgtaattcagagattttttgcaaaagataaaaggagaagcggcaaatgacaggaaaaacacacatcatgggaggcatcgcttcttgtacggcagcggcttattattatggatttgatccagtgcttatggctgcgtcaggcgcggttggagcattaatacccgatatctgccacacacaaagcaaaatcgggagaaaatttcctattttatcgaaagtggtcagctccgtttttggccatcgtacatttacacacagcttgctgtttatgctcatcatgttttttatcacttctacatacattccagataaaaacatatcagccggcctgatgatcggaatggcaagccacttgattcttgacgcttggacggtaaacggaatcaaattattattcccttcaacgatccgcgttcggcttccattatatatgaagacaggcagtttttctgagcagctcgtgctagctggcctgacccttgcttcatgttactacttttatatgctgtttcatgggcgcatgttttaaacatgagtgctgagacttgtctgaaccggctgtttttagtaggttttacttaagaagcatttcatgcagatgatcaagaaaacgcgaggagtcatattgatgaaaggaaccttttttcacaatcagcggtttttatgtttttcgatcttatttatgtggatcaaaacgtatgtgatatataaactcggctttgatttgcaaatcgatactctgttggaggagctaatgctgctggtcaacccgctcagctttattcttcctttattcgggatcggcctgtttctaaaagaaaacaagcagcgggcctttttgctgatcgccaatttggttctgactgttatcttgatctctaatacgattttttacggcttttatatcgattttattaccatcccggttttatttcaggccagcaacatgagcgatatgggcagcagtgtaaaagaactgttccatcctctgtttatcgccctgtttgtggatttggtttttctgctgctgttcgccagaaaaaccaaacacccacagacaaaagccgctccccgcacgatcaaacggtactatgcagcttcctgcggcatgcttttatgcacactggcacttgcagaagtacagcagccgaagcttttggcacattcttttgaccgggaaatgctagtcaaaagcatcggtctgtttcagttccatatttacgatacaatttctcagactgttaatatcagcgcgaaagcttttgccgatgaagacagtataactgccattaaaaactacacagaggctgattacagcaagcctgatcaaagcaaattcggtcttgcaaaggggcgcaatgtcatctttgtaacacttgaatcgacccaaagctttgttctgaatgaaaaagtaaatggaaaagaaattaccccatttatgaatgatctcataaaaaaaagctattcctttgatcatttctatcagcaaacagaacaaggaaaaacatcagattcagaatttatcgtcgctaactcactgtatccttcccttagcggcgccgtctttttcacgaaaagcgaccatcaatttcatacgatgtataaatcgctgaaacagcacgattattattcagccgtctttcatgctaaccataaaacattttggaacagagatgtcatgtacgatacgtttggcattgaccgcttttttgatgttgatgattttcatgtcactcccgggacatcgacaagctggggcttaaaagacaaagaatttttagagcagtccgccgaaaagctgaaaagcctgccacagccgttctacagcagttttatcacgttaacgaatcattttccgtttgagattgatgaaaaggatcagctgatagatgaattcgattcaagcagtgatctgttaaaccgctatgtgaccacggttcgctatgaggatgaagcattgaggcattttatcaaaaaactgaaagacgaaggcttatacgaaaattcgatgatcgtatttatgggagatcattacggcatttctgaagcccataacgaggcaatggctgagtttttagggaaagacgaaatcacaccgtatgacaacgttcagctccagcgggtgccgtttatcatacatatcccgggaatcaccgatcaaaagccggaaaccatccctgatgccgggggacaggtcgacgtcaggccgacgctgatgcatttgctcggcgttgagacaaaaggcgatatccaattcggcaatgatttgctgtcgggcgaccgcaccccattcgccgttctgcgaaacggcagctttattacgaacgattatatatacacaaagaacacgtgctatagccaaaaaacaggtgaagtgctggaagatcaggatgcgtgcctcccttataaggagaaagcaaacgaagaactgtctttctctgataaaattttaaatggtgacctgctcaggttttccgaatgaaaaaaatccctctatcaagagggattttttacgtttccaatatcaccttgccagtcagcttcgtttcatagccgtttaattgagacaaattcgccttgtattcctcagaattcaaaatctccttcacggccttaagcagctgctcatgttttttcaaaacgacaatatcatattgttcgtcgatgagcgggataaaatcaacactgcccatatgtgccgcgtgctgtgccccgattcccgcgtcagcctgtccgcttgaaacttgtgaagcggcagcgtaatgatcggtcacgatatcgtcgtatccctttacatcagccggattcacaccaagcaagccaagctgttcatcaaggagcacccttgcgccagaacccttttccctgttgatgatccggatatcggctcttttcaagtctttccagccttgaatgtttttcggattccctttttgcacatacagtcctgctttccggagaacgacattgatgagacaaaacggttcacctgtcaagatccgtttcacataaggagcgttatactggcccgtttcagcatcgtacaaatggaggctgacaatgtcacacttgccttgatacatatcaatcaggctgtttaagcttcctttgtatttacggagcggcgtctcttgaatggcattctccaaatgcttgctgagaagatccatcgaaatgtcctgtccgctgatcatgacattcggtctgccgtccggctcagcctcctgcacctgtttcggtgcttctgttgcagcgatgggctgagacattctcatattcgttttatattgctttaaatcttcttcatccacacgcatctgccttccgacacgataagcaggcagcacgccttttttaatcaagtcataaacggtcagctttgataccttcagcagacctgcaacttcttctatcgtataggaagaggtttcattcatcatcatcactctcctattttattataccttttcgttgaatgtaaaaaaacccacataaaccaaacataatcagttataattagttatatctaatgataaggggtgcaatcatgtttaagaagtattctattttcatcgcagccttaaccgcttttctgcttgcagcaggctgttcttcaaaccagtcttcaacggacagcgagaaaaaagtaacgttaactatctcagctgccgccagcgcgcaggatgcacttgaggaaatccaaaaaaattatgaaaaagagcatcaaagtattaccatccaagataactatggctcatccggcgccttgcaaaaacagatttctcaaggagcaggagcagatctgttcttctcagctgctgaggataaatttaaaaagctggtggatgatggagatatcgcaaaaaaagacagcactgatttagtcggtaatgaaattgtgctggtcgtaccgaaaaacggagattcacctgtgacaagcttcagcaatctggctgaatcagaaaaaatcgctctcggcacgccggaatccgtaccggcaggagcttatgggaaagaatcactgacaaagctgtctctatgggacaaagtgaaggataaaattgtgtatggaaaagacgttcgccaagttctttcttatgttgaaactggcaatgtagacgcaggtattgtttataaaacagatgccctggtctcgaaaaaggtcaacattatcgacgaggcaaaagcagatacacacagcccaattatctatccgttaggaatcgtaaaagatacaaaacaccgtaaggaagcgaaggaattttacgaatacctgcaatctgatgaagcaatgaaagtatttgagaaatatggctttactgccaagtagcataagcgcttcagaatttttcacacccgttgtgctttcctttcaggtggcggcagttgccggaattgttgtcattattctcggaacacttgctggagcatggatgtcacgggcatcatttttcggaaaaacggcactcgaaacatgttttatgcttccgctcgttcttccgcctactgttgtcggttttattttgatcgtcattttcggaaagcacagcttcatcggacaagccatcgagtggattttccagcagcctgtcattttcacctggtgggccgctgtgatcgcctcggctgttgtagcctttccgcttatgtatcaatcagccaaaaccggatttgctgacattgatcccgatatacaaggtgcggcaatggtagacggcgctagcagatggaaagtgtttatccatatctccgtcccgcttgcctatccttcgttactgaccggaagcatcctcagccttgcgcgggcgctcggagaatttggcgcaacactcatgtttgcaggaaacatccccggtgttacgcaaacactgccgacggcgatatatgtcgcattggattccggcaacaatacccttgcttgggcgtgggtcgtctgtattgttgtcatttcctttttgatgctgtttttcattcaacagaaaaaaacgcactaaaaaaactccccataacagggagttttttgattaaaacagaagctcatcaggatttgggccgacacgctcatctttatttaatgcgtcaattttgtccatgtcttcttgagacaattcgaaatcaaaaatatcagcgttttcgatgatacggtgttctttaatggattttggaatggttacaacttcatgctgcagatcccagcgcaaaatcacttgagccacagatttattgtgtttttcagcaatctgtgtcagtacttcgttatccaaaagctgtccctgcatgagcggagaccacgcttccagctgaatgccttgcgctttgcagtaatctcttaattctttttgcgtcaagcgagggtgaaactcaacttggttcaccatcggtttgatttcagcatctttcaacagctcttctaaatgatgaacttggaagttgctgacgccgatcgcgcggattttgccgtctttgtacagcttttcaagcgcgcgccatgtatctttatatttatctttgccaggccagtggatcaaatataaatctaagtaatcaagctgcaatctttccagactcttttcaaaggcagcaagcgttgtttcgtagccttgatcttcattccacacttttgatgtgatgaagagctcttctcttgccacaccggattctttaatcccgatgccaacgccttcttcatttttgtagatcgctgctgtatcaatgctgcgatagccatttttaattgccgctttcactgattcagtcgcttcattaccattttctactttaaaaacacccagaccgaaccaaggcatttcaactccgttatgtaactttacagtatcttttaaacttgttggcacttgaacatccaccctttcactgaaatgtaagcgtctatattatctcacattcctctcagccgataccaataatacgcttaagaccctctttttgcttcttttttcacagcacaggcaaatccaaacactatttttttcctattttaacaatattgagattacaaatacattgagcagggtatgcgtgtagtgtaaccaaatgaaaacaaaggaggaaacaacttgaaacgtattcgtatcccaatgacacttgctcttggtgccgctttgacaattgcccctttgtcctttgcttccgctgaagaaaatcctgctccgaagatgtcgcagacaactgctgctggaacaactgccgctgatgtaggtttaaacgtcaatctggatgtacttggaattgccaaccagatcgctgatgccatcaaatccgcacagaacagggatgggtttgtgaaaaacctcatggagtcttccttctacgcatccggccaaaaatataatgtcatggtctttaatttaagccaggaatatgaagatcatttgaacggtgtgcaattttacggctcagccgtttacgacggcattacgtatggcatttgggtatttgaagatggaacctttacaaacaaaggcgatggcggctggatcaactgggccttcagaggctggttcgaccgggatggcagcactgtcgcatttcatcgcccttaatatagaaaaaagctggcgctctaacgccagcttttttgctgcatttattcgccgccttcaagcatggcggcttcgacatcattaatgtattggcgaagctcatgggagatgtcccgggaaatttctctttcctcgaaaagtgtttgaatttcatttctgatcgcctgtacagccttcagcttcacttccagcttctgattttcaaaatgggcgcttgatttcagctcatgatggctgtgctccagcctgaaaattaactgtttatagaatgtaatgacagataaaaacacttctttatgctcttccgtcttgtgtttttccagatattctatcgctgcttttgccgttttcactcttgttgcccgtatcaatcccgcttcatttaaaatcgacatctccggctttttatgttcaccgaagaaaatccaatacatcagcctcttgagccttgtttttgataatccgactttaaacgggttcgcatacaaaatttccaactcgttaaatcgttcttgcagcacatttgctgtttcttccgggatgtctccccgctccagcattttcatcagcgcctcttgctctgccttaaccccttgggcacggactttacgctcgtgctttttgatgcgattagacgatgtatattgctgaaaacgaagatttttcattttctcattgtattcagctatcaccgcaagcgaggccgttttgtttgtctcattcatgtcctctttaatcgtttgaagggctgttttgatcaatttgcgtctcgccgtcagcagcttcttgtttcgttcctcgtcctcttcttctttttcagtcagaatcggcagcacaacggtagcaatgacaagcgtgcataaaatgacgccggctgctaaaaagagaatcagatttctttccggaaacggcgtgccgtcctccaggaaatacggaatggaaaaagaacctgcaagcgttactgctccacgcacaccggaaatcgaaattaacagcgtcgaacgaagacccggtttatagatgttctgatctttattaaagaaccatttgccgttccagaagaacagcacccacaggaatctcaggagcattaacgtaaatgtgatgactaggatatagccgatcaccttcatgttgctgatggcagtgtcgttaaagataacagaaataacatcagggatttgcgtgccgagaataacgaagaccagaccgttcaaaataaataaaataatgttccacgtacttgaggagacaatttgcagcttgatcatcgttgattccagacgatcctgttcaaccgcatgggtaataccgccagccacaacagctaaaatgccggaaacgccgatttcttcagctgccaaataaatcacaaacggcgtcagaatttgaatcagcatatgcatcgtgacatcctgcatgccaaggcggcgcagaaataggcgaaaacgaataatcaaaaatgaaatgacaaccccgcacagcaagcctccgagagaaataaagacaaagctgacagccgcttgtgctaatgaaaatgcgccagtcactgccgctgcaatcgcaaacttaaaggccaccagacctgatgcgtcattcatcagcccctcaccttccagcaggcgaagaatcccttttggcattttcactcttcctgataatgcgctgacagcgacgacatcagtcggtgaaagaatggccgcaagtccaaaggccgctgccagcggaatagcaggaatcatccagtgaatcgtgtagccgcctacaatcacagtcgcaaatacaaggccgagtgcaagcaataaaatcggagcccttaaattccaaagctctgcccgcggtgtcctctttccatcattaaatagcagaggcgcgataaaaagaacaaaaaacaattcggtgtttaattcaaaatgaagtccctgtggaaatgaggcggcaagaatcccaagagccacttgaatcagcggcaccggaataaacggaataaaccggttcacgatattagaaatcgcaataatcgttaataatacgagcacaactaaaaatatgtccaaatgcatgacctccttcgtctgttgtgtgtcggcatgatgagccaaaaaatctgtttgtctaaaagcccttgagctagggtggccttgcatccgctatgtggttccgcaggagttctctccacacttgtcttcttttatagtaccctttttagggtattttttctcatgatatgctcacagtgaacttttttgcagcagagcaaattacagaaaaaagagacaggaagctactccctgtctctcgtctttctttctcaatcatgaaaattcgtaccgtcagttgttgctttgataatgcccgcgcggatgacaaagtcaccgaaatgctcgccttcctcacgttctttcgcatagcgggaaagaaggatgcgcagctcgcttaaaatgtctgcttcaccgatgttttcacggtacattttgcttaaacggcttccgtcaaacgcagcgccaagatacatattatatttgcccggcgcctttccgataaatccgatctcaccgagtgcatgacgtgcacagccgttcggacaccctgtcatgcgaatggtgatttcctgatcacgaaggccgttttcgtcaataatctcttcaatcttatctaacagggtcggcaaataacgttctgcttcggccattgccaatccgcaggtcggaagagcgacgcatgccatcgagctgcggcgaagtgctgaatagtgcttgccgtcagttagtccgtactgttcaattaaagcactgatttcttcttttttatcgcttgaaacgttcgcaatcattaagttctgattggctgtcagccggaactcacctgtatgaactttggcgatttcccgcaagccagtcatcagcttataatcatcgtaatccgttatacggccgccttcgacaaacagcgtgaaatgccatttatcctcgatgccttccacccagccatagcggtcgccgttatgatcgaaatgatacggcttcgcttcttccaggctccagccgagacggttttccaattcttcttttacgttttctaaaccgaggcggtcaactgtgtatttgaaccgcgcatttttacggacagaacggttgccgtaatcacgctgaatcgtaatcgttttttcagcaacgtcatacatttgctcaggccggcagaatccgatcaccttggctaattgcggatatgtcgcagtatcgccatgcgtcattcccataccgccgccgattgccacgttaaaaccgatcagcttgccatcctcgacaatcgcaatgaatccgagatcttgtgaaaagacgtcaatatcattagacggcggaacggcaataccgattttaaacttccgcggcagatagagcggtccgtacattggctcgacttcttcctccggcgtgccggcaactctttcctcatcaagccaaatttcatgatatgctctcgtccgcggcagcagatcatcacttaattttttagaccactcgtatacctctgagtggatttcagattgataagggtttgatgcacacatgacgttacggtttacgtctccgcaggctgcgatcgtatccaaaagtgctgagtggatcgtctgaatggttttcttcatgttccatttcagaatcccgtgcatttggaacgtttcacgtgtcgtcaattttaatgtgccgttcccgtatttctgggacaggtcatccatgacaagccattgttcaggcgtcgagacgcccccgggcatacgcacgcgcagcatgaactgatatgcgggctcaagcttctgcttttggcgttcatttcggaggtcgcggtcatcctgcaaataactgccgtggtgtttcatcaggcggttatcatcatccggaattcccgcactgattcgatcgagcatcacttctttcagcgtgccgcgcaaataatcactttcttttttaatgcgttcaacatcacttggagagccgtccggtgcttttagaattttggtcaccatgttgaaaaactcctttcaagtcaaatcaatatacatcacgctgatagcgtttttgctgctgcatatcggcaagataagcctccgcttcttcgcggctcatattgccttctttttcgataatttcaagcaatgtgttatggacgtcatgcgccatgtgcttttcatctccgcaaatgtaaacagccgctccttcttgaagccattcaaacaattctgcgctatgttcaagcatgcggtgctgcacatatactttttcttccgtatcacgtgagaacgccacatccatttttgtcagcacaccgtctttgagccaattctgccactctgtctggtaaaggaaatccgtgacaaagtgctgatcgccaaagaacatccatgcctttccttccgctcccgtctcctcacgctcctgcataaaggaacggaaaggtgcgacgcctgtcccagggcccaccatgataatcggtgtttcagggtctttcggaagcttaaagttttgattgtgctgtacataaaccggcagtgtgtctcccggctgcagacgttccgcgcacaaaatcgagcagacgccttttcgttcacggccgtgcgcatcgtagcggactgcgccgattgttaaatgcacttcatccggatttgcggataaactgcttgcaatcgaataaaggcgggcaggcatttttcgcaaaatcgagacaaactcctgcgcagatacactaaatgggccatagtcacggacgagatcaagcaaatcgcgcccttcaatataggcttttacattctcctcatttcccggggctaaaagctctctaagctcatcgttccctgtcagctgggctgcctgttcaagaagcggttttgtgagaacggtaatctcatagtgagaaatcagcgcttctttcagcggacggacatcaccttgcttattaagcgtcacaatttcttccgggtcccaattcatttccttaaggagcagctcgacaagttccggatcgttttctggatagacgccgaggctgtcaccaggctcgtaagtcaggcctgatccttcaagagacagctccacatggcgtgtttctttatttgatcctctgccgtttaaatttaaattttctaacacttcagcccgaaacgggtttgttctggaatacgaagactcaccggtttgtgacgcagccgccggcgcaggcgcggcggttccgcccccagcttcatttaatcccttcaatacaccctcaagccattcggctgccggttcatcatagtcaagatcgcaatcaacgcgcggagaaatccgttttccgccgagttcttctaagcgctgatcaaattctttccctgtctggcagaaaaattcgtacgaactgtcaccaagcgccaaaacggaaaagcgcaggtcttcaagcttaggcgcccgtcttccgtgcagaaattcatgaaacgacagcgcgttatcaggcggctcgccttctccatgcgtactgacgacgattaaaagattggttaccttcttcagctgattcggcttaaaatcgctcatggatgagacggtcacttgaaaaccgctctgttcaagctgcttgccggcattttccgcaagcccctgtgcgtttcccgtctgtgaaccataaagaacggtcacttcttttgaaacggccggtgcttccgcagacacagctgccgccggcgcacccgcagtttcttgggcggaaacagattgcgcggataagtatccgctcagccagattttctgggattcggtcaaggtcggcagaaggcggttaaggagctctgcctgctcctgattaaacggactgttcattacctgaagttgcaacgtatccacctcacaaagttataaactgatcgaaaattgcatctaattgaactttaccggaatactaggcttaagtaaaatatatttacatgatgataactattaagaatcctaatgataaaacggctatgcttcatgtaaatagaaaaaagagaaggactcccttctcttcattcagccatctgatataagtgaggcggcacagcggttacaaacggactggcttcacctgtataaaatactgccagcatgtgcatcgcacgggtgcacgcagtatataaaagcctgcggtcgtgctctgtatgatagtgttcttcagatgcatcatagacaagcactgcgtcaaattcaattcccttcgctaaatacaccggaatcacgcaaacacccttttgaaatggttgattttctttatgaatcaggcgaacatctgtatattcactcatgtgggcgtgcgcctgtatgcattgctgcgcagtcttgcagatgacggctattgtttcgcgcccttttttcttgagccggccaatttcttgcgcgagcttttggcaaaggctctcatgtccttcagttttgacaacgagcggcatttccccgcttctattaaacggctcaatatccgctccatattgaagcatcgctttggtaaactcgacaatctgccttgttgatctgtatgttctctttaaacgaacatactcagcaggctcatcctcaaagcacgcatccatacgctgatccccgtgtatggtatgcgcgtagatggactgattgatatcaccgagcactgtcatgctggcagccggaaaaatgcttctcatgtaaaccatctgaaacggtgaatagtcctgagcttcgtcaataaatagatgtttgatcttcgtatttttctttctgccctcaatcagatcctgcatataaagaaacggtgctgcgtcctcatagagcaatttattatccgtaaatgccgaactggtcagctcacctatcgcgtccatcttctcatgctgaaattttcctccccagccagaaaacaattgcaaataaagttgtgtaacatcaagaaatgcaaggagtctgaccgcctgtttgagcggtttgaaagcttttttcacaatgatggcggcaagcagctgctgctctctttgataatcgttaaacgtactctcgctgaaccgtttcctttcttgcagttttctgtacacgtccaagtagtcctctttgtcaagcagctcagcttcatgaacaacccaatcctttcgccgttcctttttctcaagcttgttaagctcactcagcagccacttcgcggtttgctccatccgattcggaatggagtgattttgatccaatgagtaaaaataggattgaatttgctcctttgtgatcagcttttgtccgcggaatataatatttttaaaaatcatcccttcagaggaaagccgtgtgacgtattcattaatgaattgctgaaaggataaacccgccttccatgtgattcccgcaagccttgttggaaaatcgccttccttagtttcggtcaggcaatattcgagctgatcaaaggcgctttcacatttgaacttgcggccaagacgatgctcgatatattcctgaaacgtcgcctgctccatattctcttctcctaactcaggcaaaacagaggatacatagctgttaaataagaagttgggagaaaacaaaacgatttgtccggcatcaatgacgccgcggtgcctgtataacaaataagcgacacgctgaagcgcagccgatgttttcccgctgccagccgctccctgcacgatcaggatcttgcttttttcattacggataatctgattttgttctttctgaatcgtagacacgatgtttttcatttgggtatcggagtgatggcttaatacctcttgcagcatttcatcgccaatcgtcatatcggtattaaacatcgccttgagagtgccgtttttgatcataaactggcgtttcagcaccatttccccttctatcgtttcaccgggcacctcgtactccgcttttcctggagaataattgtagtacaaacttgatatcggcgccctccagtcatagatcagaaagtgttcctctttctcatccaaacaggaagctaaaccgatataaattcgctctgcctccgcctcgccgttttcaataaaatcaatccggccgaaataaggcgattttttcaattgatgaattcgtttgagctgctgatccatgcgccgatgattctgttcccgatcagacagcagctctgcctgctgcttaatgcttgccatcgtttcaatcgcttcatgggcatcatcaaaattaaccttaacatcctcccaaaagctttttcttaatccgatgatatcatgcttcaacccgcccgcagacgtttccagaaaccgctcttttttttcgagctccttcagcacctcatctattctcgactgctcttccttccattccttatcctgctgattcatgaacggcacctccagaaaatagttgacaaacatagatgaaatactgtaaaatataattggatacatatattaaatatatgatgtaaactggcaaatacaatttataatagcacattcacccaataccaatcaaggtttgggttatttatatgcagaaaaaaccgatttcaactcgaaatcggttttttctcttatgatttcacattgatcactgttggacgtgcttttcttaggttgcgaatcttctctttcatcagtatcgattccttattcctttcaatcttcgatataatatatctttttcattttaaaaacaccgcagagctttaccgtatttgtctgttcatctaacgtgaagaatgactaaactggctgttattgtcatcttccataaagcaactacatctctgctatcgtatctatagtcgcagtaaaatagtcatttttcacccattttcgacacatttcaacaaattaaagtttttcatttgggagaataggacgatgttacattatttctctcggtttatgatatgaacatgaagaaagaaccagaattagttaggaggaaatactcagtgaagaaaaagctatctatgttgttgctggcattcgtcgtagccgtaacaagttttacgtcaattgacctagtaaacaacaaagcggaagctaaagattgggttaaaaaaggtcaaatatggagtactcattaccattcgggctcatttaaaaactatacttactcgccaacttttcatatttattatccaggacgaggaacttgggccaacatgacatcaaatggatcaggcagcgggaaaattacagcaactctgcaacaaaagacaaataaaggctggaaaaatgttaaaactttttacgcaacgaaaaaaggctctacaaatttaagttacaaacaagcttctaaaagctacaaaacaaaatacagattcaaattcactaacacaggaactaaaaaaaccatcagctataccttttgggctacctattaatttcaaatagctttgctctgcgcggtcagcattcgaaaaggactttttatttgatcccggcaggctaccataaaagaaacctctccgtcatggagaggtttcttttattttactgactatctaagcgaaaagaacggtttggcagcttccaattaaacatataggaacaaacccggcaaacaacgagcacgaaaaacagaacgtataagccgaacgagttccccatccagcccaagccgacgattaaaccgccgagagccgcccagactgcataaatttctgccttcagcacaagcggtttgcgaccggcaagaaggtcgcggatgattccgcccccgcttcccgtcagcaccgcagccacgatcacggcactaagcggatggcccattttgacagcatacagtgcgccttggatagcaaaggcagcgaggccgatcgcatctgataaattgccccacttattccaatgcttcagcagcagcttcggaaacagaaacacaattgtaatagataaaagcgcgatttgaaagtacgctccctgctcccatagcgctgacaccggaacaccgatcagcaaattgcggatcgctcctcctccaaaagctgtgacaatccctaatatataaactcctaaaatatcatattcctcttccatcgcaacaattgcgccgctgactgcaaacgcaatgatgccaatcacactaagcagctcccaagccattctgatgactcccttttatgtttgttaaattttctgacgacctctagattttataatcgctccagcgtaaaatcaataacatttttatgagaaaaaaagataaatttagagggaatacggctattgctgatggacatgagtttgcgaaattaaaaaagcgcccggcatacgcgggcgctttttttgttattcagatttttcgcctttcagcaggcacataaaaatgataatcaggataaaagcaatcagggccaggaatggaatcgtaataaaaccaaaccagttaatatattggcccgagcacggcacgccgcttacacacggcttaatgccgctaaaaccgggcactttttgttctaagtaatgcatggttgaaatgaatgcccctataatcgccatcgggagcacatattttttcactcgtgtgtccccttgaaaggtggcgatgcctaaaatcagaacgagcggatacatgaggatacgctggtaccagcacagttcacatggaataaactttctgatttcactgaaatacaggctgcccagcatagcgataagagccacaacccaggaagcatataaaaatacgattctatttttcatatcgttacttccctttcagctctttttctattgtctctttgatttcatcataatccgcaaaatttttgatcactttatcattgacgtaaattgtcggtgttgcctgtatgttcattttttgattaaggtcagaatccttttccacttgagaagcgaatgtttccttatcaagattttccttgagcgtctcaggttttatctttgtggtgctttttgcaagatcaccaaggaggcctggggttacccattcctgttccgtatccggctgtttttcgaacagcttttcatggaaatcccagaaagagtcagggtcttccttccatacttcttcagatgcaagagccgctaatcttgaaccttttccatggaacatgacgttcacgaaagaaaatttcacatcgcccttatcaataaagtctttttgtatttttggaaagatgtcactgttaaacaccttgcaagacggacatttgtaatctccgaattctactacagttaccggtgcatcgtccttgccaagcacaggctgccctttgatagacggctgtccggaaaccgcatcattgccttgttccgttttgttattaatgatgacaatggctgctagcaatacaacaaccacaaccgtaaggatgaccgcgaatttcgcagaagactgctgtttctttttcactccgacacctcatcgttttaaaattaaaaaagaagcggatcgcaattgatccacttctttattttaacaagacaagcgccgataagaaaaccccgaaaaaatgaattctctccgacaatttatttgtttttgagacgcatgacgcgcatagcgtttgccacagcgagcagtgtaacaccgacatctgagaaaaccgcttcccacatggttgcaattccaaatgctccaagaatgagaaagatcgctttcacacctaaagcaaagccgatgttttgccacacgattcgccgtgtccgtttcgcaatccgaatcgcttctgctatttttgacggctgatctgtcatcagcacgatgtctgcggcttctaccgcggcgtctgacccaaggcctcccatcgcaacccctatatctgcgcgtgcaagcaccggcgtatcattgatgccgtcaccgacaaaaatgagtttttcactaggcaaaagcttagcttctaatgcttcgacctgcgccactttatcttgcggcagcagctctgcatatacctcaccaatcccaagctgttttccgacggcttctcccgtttgtttcgaatcacccgtcagcatagctgtctgtttgatcccaagcgactttagatcagcaaccgcctgtgctgcgtcttcctttacttcatccgctatgatgattgctccggcatagcgttgatcaacagcaacgtgtacgattgttccagcattttcatccgggacatcctcaatttgttctctttccatgagctttttattcccggcaaggatctcagttccatttacctttgcaaaaatgccgtggccggggatttcttcgtatgactctatctcatcggaggaaagcattttcccgtaagctttacgcacagattcagcaatcggatgctgtgaatgaagctcagcgtatgccgccgcttcaagtaatctatcctttgtaaaaccttccgcgggtttgatttctgtcacttcaaagctgccttttgttagtgttcccgttttatcaaacaccgcgtatttgacttgattcaaagcttctaaataattgcttccctttacaagcactccggcctttgaggccgctccgattccgccgaagaaaccgagcggaatggagacaacaagcgcacaaggacaagaaatcactaaaaagataagcgcgcggtacacccaatcggaaagcgcggcgccagaaagaacaagcggcggaacaaaggccagcaataccgcgatgatcacaacagcaggtgtataatacttggcaaacttcgtgataaagttttctgtccgggctttacggctgctcgcattctgaaccaagtctaatatttttgatactgctgattcttgatagccctttgtgacttcaatatgcagaacgccgttttgattgataaagcctgacattacatcttgtcctaccgcagcttttctcggaacggactcacctgttaaagcagatgtatcaaccatcgctgacccttgcacgaccttaccgtccaggggtatgctttctcccggattaaccacaatgatgtctcctgtctgaacgtcctccggggaaacctgttcgatgctgttctttgttttgagattggcgtaatcaggccgtatgtccattaacacactaattgattttctggaacggctgaccgcggcaccttgaaaaagctcaccgatttgataaaacagcataacggcgacgccctcagggtattgctgaatcagaaaggcgccgattgtggcaagagccattaagaaatgctcatcaaacacctgaccgcggatgatgtttttgactgcgcggatcataatgtcaccgccgatgatcaaataagcagcgaggaaaaggaaaagttcaatggttcccgaatgaaccaaatatgccgctgcgccgagaatgacagccgccgccattctgatcagcatattgaccattctattacgatagccatcatcagctgatttctttttatgcttttggcgaaccgttacatgcggatcaattgatttcacttttttctctactttattcgtgacccattgctcttctttcccatcggctgagacagttaaggtgcttgccgcaaaatttaccgcgcatccgtcaatgccttttatgcctttgactccattttcgattttttgggcacaattgctgcaatccaaaccgtccagaacgtattcctgtttcactagtctcaccttaccttccgatttagggttcccacttcaaagcgtatcaatgagtattgcattctttataatatatatgagcatatactcatataatagttacacctattatatgttgttttccaagaaagtgtcaatgaaaaacaaaaaccggcatatagccggtttttcattttactttttgcagacgaagagcattcagaacaacggaaacggagctgaatgccattgctgctcctgctatccacggtgctaaaaatccaagtgctgcgattgggatgccgaggctgttatagccaagcgcccagaataagttttgtttaatgtttttcattgtcaatctgctcatgcggattgcgtcggcaatgctgttcagatcgccgcgaataagtgtaatgtctgctgtttccatggcaatgtccgttccagttccaatcgccatgccgatgtcagctgtggcaagcgccggcgcatcgttaattccgtcgcctaccattgccgtctggcggccttctttttgtaggcgggcgatttctgctgccttttgttcaggaaggacttccgcaatgatattcgtaattcccgcttccttcgcaatggcttctgcagttctgcgattgtctcctgtcatcatgatgacatcaaggcccaattctttcagacgggcaacagccttccgcgacgtgtccttaatcgtatctgcaaccgctactagcccagctgcttctccatcaatggatacaagcataactgtttttccttctgcctctagctcttccattttggcgagaagagccccatgctcaacctgtttgctctccattaattttcttgtgccgacgaggatgctttttcctccagcttcagccaaaatgcctgcgccgacttttgcttcaaagcgggtaagcttcggtatctcaagccctttatctttcacgccagcaataatcgcttcgccaagcggatgctctgatcccgtttccgctgccgctgcaaattgaagcaaatctttttcttcaaaatggccgaatggaatggcatctgtcagacgcggcttcccgtttgtcacggttccggttttatcaagaacaattgtatcgagacgatgtgttttttctaaatgctcgccgcctttaaataaaatcccgaattcagcagcgcgtccagatccagccattatgctcgtcggagtggcaagaccgagggcgcaaggacaggcaatgacaagaaccgcaatgaacttgctgatcgcttcggcaaaatcgccaggagccgcccaaagataccaaatgagaaaagtgagaacggcaatccccaatacaatgggaacaaaaatacctgaaatctggtcagcgagacgctggatcggcgcttttgacccttgtgcttcctcaacaattttgatgatatgagaaagcgcagtatcctttccgacgttgacagctttaattttcagaaagccgtttgcgttaacggttgaacctgtcacgctgtcaccaggatttttgtcaacaggaagactttctcctgtaatcatcgattcgtcaaccgctgagcggccttcaaccacttctccgtcgacaggaattcgttcgccaggtttgacgtaaacaatgtcattaacaagcacttcgtcgatcgggatgatttgctcctgtccgtctcttacaacagtagctgttttcgcttgaagcttcatcagctttttaatcgcatccgaggaacggccttttgcttttgtttcaaacaacttgcctaataaaatcagcgtcagcaaaatcgcgcttgtttcatagtaaaggccgtctgtatgcccgtgagagccaaggctttgaaaagtaagataaagactataagcgtaagcagccgtcgtaccgagggcgaccaatacatccatattggcgcttttatttctgagcgccttatatgcacccacataaaacggccagccgatcagaaattggactggtgtcgccagcgcaaattgcatccacggattgagaaatatatccggtacccaaatgaatgatgtaaatgtaaaatggctcaccatcgcccaaagcaatggaaatgacaggacagctgaaaaaatcagtctcgccgtttgcttcctttcttctttctttttagcagcagcagcctcactgtcctgttcacccttcaactttagcttatatccaagcttatttaccgcttctttcaaatcgctgacagacgcttctttcggattgtattcgaccgtaactgtttctaaagcgaagtttactggagcatttgcgacgccttctattttgttaagccgtttttcaatccgattggagcaagccgcacaggtcatgccttcaatatcgaattcagctttttctgtaacgacgtgatagcccagcttttctattttttcttgaatcgctgcagtccctgtttcagcaggatcgtagattacatttgatgtttccgtcgccagattaacatttgcatccgtgacaccgggcatccgcttcagtcctttttcaattctggcagcacatgccgcacaggtcataccagagacctgcatcgcgatttccttttgttcactcaacatactcactcctttatatacacctggggggtatataaaaatgaaagaaatatcgcgcctccctataggcgcgataccttgaatcactcagctacgtcatagccctgatcttctatcgcatccgcaatatctttgactgatactttgtcagcatcaaacgaaacatcgactttacccgcttccagattgacatgaacggcactgacgccgtccagttctcctacgcttgtttctactgctttgacgcagtgctgacaagacattccttcaacttgcaatgttttttgttccataatcaattcctcctgtttattctttctattttcatcctaccatacccctgtagggtattacaataaaaaaacgctttatgattttgtgaactttttaaatacgtccaaaagctcagaaatggcctgttccccgtctccgcttttgatggcatctgctacacaatgatgggcatgatcctcaagcaaatgaagcgccacatttttcattgccgcctgaacagctgaaatttgcacaagaatatctacacaatatctgtcgttttccaccatgttttgaatgcctctgacctggccctcaatccgcttaagccggtttgtaatctgatccttttctttcgagcttttatggtttaatgttttatgttcgttatgcttttccatgcgtacacctctgtttaatgatattaattcccattatactgattgtccaaacggttgtctaagcatgccgatccaaaaaatgaatcagttaggttttaccatttgatcaggagggtatatacttctgttgataacgcttttaaaggggagaagaaaagtggacacgatcaaggttggaatattaggatacggattgtccggttctgtttttcacgggccgctgctggatgttctggatgaatatcaaatcagcaaaatcatgacatctcggacagaagaagtgaaacgggactttccagatgctgaggttgtacatgagcttgaggaaatcacaaatgaccctgccattgagcttgtcattgtcaccaccccgagcggccttcattacgagcatgctatggcatgcatacaggccggaaaacatgttgtgatggaaaaaccaatgacagcaacggccgaagagggggaaacattaaaaagggctgccgatgaaaaaggcgtattattaagcgtatatcataaccgacgctgggataacgactttttaacgattaaaaagctgatctctgagggatctcttgaagatatcaatacatatcaagtttcctatgaccgctacagacctgaagttcaagcgcggtggcgggaaaaagaaggcactgccactggtacgctgtatgatctcggctcccacatcatagaccaaaccctgcatttgtttgggatgcctaaagccgtgactgcaaacgtgatggcccagcgggaaaatgctgaaacggttgactattttcatttaaccctggactatggcaagcttcaagccattctatacggaggatcaatcgttccggcaaacggacctcgttatcaaatccatggaaaagattccagctttatcaaatatggaattgacggacaggaagacgcactcagagcgggaagaaaaccagaggatgacagctggggtgcggatgatccggagttttacggacagcttacaaccattcgtggctccgacaaaaaaacagaaacgatcccatcagtaaatggctcctaccttacttattaccgcaaaatagcggaaagcatacgggaaggtgctgcgctgccagtcactgctgaggaaggtattaatgtcatccgcatcattgaagccgcgatgaaaagcagtaaagagaaacgaaccattatgctggagcaataaaacaaaagcctccccaagtaaggggaggctttttcattagaatgtttttcctgcttctttcgcacgcgcaatcgcgtcttctttgatttgctgtgctttatcaggctccgcattatgtccctctacgaaaatgccatcgaaggatggtacgccgaaaaaattcatcatgatgccgatgtagcggtgtcccatttccatctcagccgcagggccttctgaatagtagccgccgcgcgcttggatatgaattgcttttttatcagttaacaagccgacaggaccttgttctgtgtatttgaatgattttcctgcaacagcaacagaatcgagatacgctttcatcactggcgggaatgagaagttccataaaggagtaacaaatacgtacttatcagctgatgcaaattgatcgctaagctctcccaaacggcctactttcgctttttcgctttcagaaagctcttcaaagcctgtacctgactgaagctttccccatccgctaaatacatctgcgtcaatgtgcgggatgttttctttgtacaaatcgatatgtacaacttcatcatttggattcgcttctttgtaagattcgataaatgctttacctgttgccatactgtacgaagttgcttcgtcatgcggatgagcagtgatatataatacttttgccatttttaccagccctttcgtttttaaaaatcacacatcaattattatcatacagatgcataatgattattctgtctctcttagactttattataaagacaaagaaatttactttcaagtaaaatatctcgaattaaagattatttaactttcccaaacagcttacttttcaaaagctgttctcaagccggaatacagcgcggacagttctttactgattcgaggataatgagggacatgcggcacttgaatatccgcaggcatccttttcactataaaggattgctcagccttttcaaaaaacgcccccagctggttgatctcttcatcagaaaacggagcaggcggacggcggtgagcttgggccgaaagcaaatagtaccctaagtgctgagcaccggaaatggcaggccagagcgcatccgcattcgcgtgaggaaactcgccaagcgccttgtcatacgcatcccgaagcctgacaagactcacccttaacttgtgttcgtcggcaatttgcccggttaacagtttctccataaactgcccttccagccggatgacattccgcacaagttctggcagccgcttggttgaaaaccgccgccacaaaagcattgttcccaacagcccgatcacgctgccgacagctacatcagtcagcctcgctatcataaaataaccggcacccgcgccgccatgcatactttctgtgataacaagcgcatttgcggttaaaaagggaacagccagcgcataattgcggacgatcagcatctcaagaagacattgcagcgctgcaatacaaaacgcaatataaacaccgcccagcttaaaaaacaggattgcacctgccagcataacaccgatcaccgttccggccgaacgctgaatagccctgtgaagcgtaaaaacaacagtagtgccaagcatgaccgctgctgccgaaagcggaatccaataggagcgtgcaaagccgaatgcgagggcaaacatatcggcggcaaacagaacaattccgtactttaacgctctaatcaaaactggagacttccagtcaaaagcatttctcaaaaagtaaaaagaggatggcaggcggcttggttccccgtcaagctgcttatcaaaacgtcctgaagcgatatgcaaaacctcattgatttcttcaaacagcttccgcctaggctcagattcgttctcattaatctgaaacgtaccgaaaacccgtgcatgcgcaagcatatctccggtttggcgaagtgccttttcaatctgcgcggtctctctgtccggcgtttcagctgaaaaatgaataatggcaatgaatatgtcgtcagctttttcaagcaggcggaaaaaccgttcatcatgccgcgattttttccgtttattccctttcccaagaaccgtttgtcgggctgttctaagcatgagcaccgtctgatgctgtgcgttatgaaaacctggcgttccgacggctgaaagacatgcagccagctgatgatatgttttttgcagcaccgctccctccggtccatgtttgttccataaccagccgattaaagcgatacccatggcgaaaatgccgccgagaaacgtcagtcccgctctgaacagcgcttgtgaaggatcggccggcagcccggaactgactaaaaaggcaaggacaaaaaacatcggcgcagggccttgaatgccgagcgcgctaaaaataaacatcgccgctgcaccgatcagccccaaaacagccgccatcatccaaagcatcccggacaaaagtgtccctaaaccaaatgagagggcgatcccaatagaaaccaagagcagcttcaaggcgcgctttttgtacgattcaccgcccgcatataaataaacaaagcctccgatacttgcaattaatccgtaatccgtgtgacctgccaatgcaccgaccagcacaggaaaccctgaagcgaaacctgatccgatagcctttttccaaggaaatggatttgcatgaatgcgaaaggcatccttcacgataggcatgattctttgattgttcgcagcagttttgttcatttgacaaaatccttttcaatgaatgtgtagaacttttcccgtttcttcgctttagtatgcccaaaaacgcggttagcttctcaattggtgcgcccgataaaaaaacagagacttataccgtctctgcttcattacatcagtttattataaaagcggcacctgtcaggactgttttgtccttctgccttccttcaagagcaggtgaataaaaaataaaggataaatcaatagatacccattaaacagccaccacacaagatcaaagtcactgctgaatgtccagaatgatagcgcctgcagacctgaacaacaggtcagcacaagagaaatcagcgccatcagcttccagtcagctcgattcacccgctgtaggtacaagctgtacaaccctgtgacagaaatcaggatatccagcggaaaaaaagaccagttccaagcgatcataaacggatggtcatgatgtttaaaagcccagctttccggtatgagagaaaacccggctgacagccagtacaagataaaaccgatatcagtcacgagaaaaaacagcttcatatatctcatttgtactgcccgcttttatgtaccggctcagacaccgcagcatgctcgatcaggtttaaagacacaacaccggcaataatcaaaccaattgaaatgactttcatgacactaacatgttcttgaaaaaacaaaaaaccaatgactgtaatcaggacgattcccatccctgaccatacagcataagcaacagatacatctattgattttagcgtaagcgtcagaaagaaaagactccctccataaaagaaaatcaacagcaaactgggaataagctttgtaaaaccagacgatagcttcatgctgaccgttcccgcaacttcaaacaaaatcgccaagcatagaaacacccaattcatgtcgcatcagcctcctcatcagctgttataccgttaaacaaaacatctacaattgattcaagcacctctcctgtcatgaactgatgtttcagcggatattcagggtcatacacttgattgatgctccctatatacatgtgaacaaacaggtccggattgatgtttctaattctcttttgctgtttgcactcgtctaataattctaggacaatggcccattctgccttaataaacgtgtctaatgtaagccacgcatcgtaatggtatttctttagttcatttaataatcccatgttcagcagttccatcccctgcggaaggctgatcagcatttttttcaccttttcaagcacatttaaactttcattttcatagatgtctctttctatttgcttcatttcagctataaattgttcgacaaccgcctcaacaagctgatctttagatgaataatatgcatagagagtccgcttgctcgttcccagcgctgccgccaaatcattcatcgtaaatgaaaatcctttctgcttgatcagccggaaggtttccgccagaattcttttatccatattaatcccccgctttcggtaccaagaaaactatttcggtaccaatattatacggcagaaatttatggaaagcaacaatatataaaaaaacctctcctattgggagaggtttaaaagacactgcggaccaaaccgccgtccgcccgaagtgccgcgccattgatcgcagaggaaagcggactgcttaaaaatgtaacaaagtgggcgatttcttccggacggatcagtctttgaataatagatgtcggccggttttctttcataaaacgtgcctcagcttcttgaacagtcaggttttcaccaggatacagcgagttcagcatggtttccacaccctctgttaaggtagagcccggcatgacggtgttgactgtgacattcgtgccggttgccagctccgccaaactgcgggaaatggacagctgcatcgtttttgtcgcactgtaatgcgccatttcctgtgacggcataatcgccgcttcactggcaatgaaaatcacacgcccttcctttttctctatcatgttatgcaaatacctgcgtgtcagccttacaccgctcataatattcacttcaaaaaaacgaaaccattcatcgtcgggaatatcaaaatactccgccggttcaaaaatccctaaattgttgaccaaaatatcaacctctggatatgcctgaaacagctcattgcagccttcttctgttcccaaatcaaatgcagccggataaagaaccgcttcagcatgttgtgttttcagttcatctatcgtctgattcactttctcttcccggcgtccgttaatgatcactgccgcaccttcttcagctaacgaagaggcaatagcttttccgatcccagatgtcgaaccggtcaccagtgcggtttttccttgtaaattcagcttcattattcatccctccgtttttgattcctcttatttattgacagaaatctgattggtgaaacatctgctctgcaatcagtatgaaacagctgggattgaaatggaagtacgcactttttggtgcctgtggtttggagaaaaaataaagcagaaccctctaagaggttctgctttattgtcagtatgtatggagacggtgggagtcgaacccacgtccagaaacatcgattacttaagcgtctacgagcgtagcctgcatatttatggtttcactcatcttcttgcctgcgggcgggccttccgagagctagtctgttcatctcttcttacgttctcagacaggaacgcaagcgtagcctacttggatgtgctcttcacagacacataggcaatgtcaggaagagctcgctgcgcttattaggcagctaatgctacgttttggttaaaactgttagttttgccagttatatttaagtgcgtttttacgagatcgcctctcggctcgcagctcaagctcgatccatccctgtcgaatccgtaacgtccccttggtataagggaaatacgggagaaaatatcaagctctcactcaaactggctatagtcttattataacatgatcacggctcttttcaattgtcaaatccttcaaatgaatggcgtcgtgatctgatcgtgaacacagtatagcacaggcctgattttcgaatcaagcactatgcctttagaagcctttttgactgtctctgaacgctctttcgatttcccgcttcgcgtccttgcgcttcaggtcttcccgtttgtcatagttcttcttcccttttccaaggccgagaagcactttcgcaaagccgttttttaaatacagcttcagcggaacgagagaatagcctttttcctttgttaacccgatcagcttattaatctccttgcggtgcattaacagctttcttgtccggagcggatcgtggttatagcggtttccctgctcatatgggctgacgtgcatattgtggagaaacacttctccccgttcgattttggcgaaggaatctttaaggtttacgcggccggcgcgaatcgatttgatttcggttccttgcagaacgatgcctgtttcataggtttcttctataaaataatcgtggttggctttcttattttgagataatacttttcctgacccttttggcatgccagaacctcctctctctaaggaaaaactgtccaccttttgcgatacgctctattttaccaaatgtcacgtaccgctacaatgaaaagctgtttccgaaagaaagcaaatagagcgctgcggccctatttgctggttgagctgctatttcttctttttccgtttctgtttcggagcattctggaagccgcgttttttctttttcttcttcggcttagtgaaccactcccctttttcctcagacggagctggagaaacaggtgtattggtgctttgaacacgttttctggcaggctttccgcgttttctgctccggctgctgtccaattctctcggacgccgcggagtgcccttcatgccgacaatttcaaagtcgatattgcgctcatctttattgacatcgacaaccttgactgtgatttcatccccgatgcggaagacgttgcctgtccgctcgccaatcattgcgaaatgctgttcgtcaaagcggtagtagtcatctgtcataaagctgacatggacgagtccttcaattgtattcggcagctcgacgaacattccgaagtttgtcacagagctgatcatgccgtcaaactcttcaccgattttatcaagcatgtattccgcttttttcaggtcatccgtctcacgctcggcgtcaactgcacggcgctccatagatgatgtatgttcggcgatatccggcaggcgttcagcccacttttcctgtgtcgcttcatcgactttgccgttgatcaaatacgttcggatcagacggtgaacgattaagtccgggtaacggcggatcggcgatgtgaaatgcgtatagaattccgttgacagaccgaagtgccccaagctttgcgggtcgtatttcgcctgtttcatcgaacggagcataacagtagatataaccgtttcctctggtctgtcacgtacagcgtccagaatgctttgcagcgcgcgcggatgaatattccccgccgttcctttcaccacatagccaaatgtcgtcacaaattctaaaaacttttgcagcttttcagcattcggctcttcgtgaatccggtatataaacgggacgttcatccaatggaaatgctccgccactgtttcgtttgccacaagcataaattcttcaatcagcttctcggcgacagagcgttctctgatcacaacgtctttaaccgctccttcgtcatcaacaagcacctttgcttctttgaaatcaaagtcaacggcgccgcggtccatccgcttatcgcgaagaatttgagccaggcgctccatgtctttgaacatcggaacaagaggctcgtatttttgcttcagctcttcatcatcatcaacaagaattttattcacatctgaatatgtcattctttccgttgttttgatgacactttggaagatctcgtgctctgtcacctgtccctgactgttaattgtcatttcacaagaaagcgtcaggcggtcaacctttggatttaaggagcagatgccgtttgacaatctgtgcggaatcatcgggatgacacggtcaaccagatacacacttgtccctctttcaagcgcttctttgtcaatcggcgagttttcggttacgtaatggctgacatcagctatgtgaacgccaagcttgtagcttccatcatcaagtttcgtcacggtaactgcatcatccaaatccttcgcatccgcaccatcaatggtgacaatcacctggtcacggagatcacggcggtctttcagatctttttcatcaatcgtgtcaggcgtacttgatgcctgttccatcgcgtcagctggaaattctcccggcaggccgtgcttatgaatgaccgataaaatatcaatgcctgggtcgtttttgtggccgagaatggtttcaacctcaccctctgcgttcatgcggccttcaggatagctcgtcagcttgacaacaaccttatgcccttccgcagctccatttttcccatttttcggaatgaagatgtcactcgtgatttttttgtcgtccggaatgacaaagccgaagtttctcgtttctgtatacgtgccgacaacccgctgaatcgctctttctaaaatccgtatgacggttccttcctgcctggagccgcttgactgtgaatttagacgcaccatgacgatatcgccgttcattgccgtatttagctcattaggcggaataaacacatcacttaacgacgtatcctcaggcagcaaaaaggcgaatcctttcgcatgggctgaaatctttccttttattaagttcatcttctccggaatgccgtagcggtcgcttctcgtccgtacgataagccctttttcttccaaggcgactaacgctttgacgagctctttaaactcctcggcttccgtaatatttaacatctcctcaagttcctgaacggtcagaggtttgtacgcctcttccttcataaacgagagaagcttttccataaatgcttctttttccattatccgacctcctgttgattaccaatcgagcttctctaaaaattcatacacatcctgatggacgaggtcacgttctttgtcgagtgtaatgacatgccctgattcctcgtaccatttcagctgtttatcatcagtttccacttcgttgtaaataatattggcgctttcggtattaatcatgtggtcatgacgggcctgcaccacaaatgtcggtgaataaatcatatcgacattattccgcacatcagcaattaagtcttgtagcgccttgagggtattcatcggcgttttttcgaattctttcatttcctcttcaatttgctccgggcttttcccctcaaactttttgtaattgcgagcgtatgaaagaacgccttgatacatgacctcttcactcttaatatgcatcggtgcgcacattgggacaattccctttatgggtacagtgtaacccaatttcagcgaaaaaaccccgccaagcgacagtccgcaggcagcaatgctctcatagccttcagattttaagtattcatagccatccattacgtttttccaccagtcttcgggccccgtatgtacaagttcttcaggcgggacgccatgtccttcatattgaggcgcgtggcacgtatagccgcgttcattcaaatatcgtcccagcatccttacatccgctgtattgcctgtaaagccgtgcagcaaaagcaccgctttgtctccgcctttaaatgtaaatggttttggtgtcacaactttcatgctcatgtctccctttctatctgcacgatcattttagttttccacagtttaatcagaaaaaaacgttttgaatatcatccagaaacgtgaaaaaggcctgacttcacatcagaccttatacaaacattgccctataggatataagcaagcgcaatcgttaacacgaaaaacaagactgccagcactaccgtaatgcggtgcaaaattaaatcaagacctcttgctttttgtttcccgaagagctgctccgctccgcctgaaatcgcaccagataatccggcgcttttactggattgaagcaaaacgacaataataagtgcaatgctgacgataaccaataaggtaatcaaaactgcgtgcatcccatacacctccagactcactggctacattacttctattttacatgaaaagggttggcatgtcacgctgtatcagacgccaaaaggccggataagacgttttatcttggttaccctattcatatgaaaaggacaaaggagaaaagcgatgccgcttatcagcatagacagcaggaaacatcttttttatgaagaatatggacagggaatccctatcatttttatccacccgccgggcatgggacgcaaggttttttattatcagcgccttctatccaagcatttcagggtgatttttcccgatttaagcggccacggtgatagtgatcatatcgatcagccagcgtctatttcctattacgcaaacgagatcgcgcaattcatggacgctttggatattgataaagctgtgttattcgggtattctgccggaggcttaatcgcgcagcataccggcttcacccgccccgacaaagtgtcacaccttattctgtccggcgcctaccccgctgttcataacgtaatcggccagaagctgcacaaactgggaatgtatctgcttgaaaaaaaccccggtttgctcatgaaaatcctcgctggcagccacacaaaagacagacagcttcgcagcatattaacagaccatatgaaaaaagcagacctggcccattggcatcagtattatctggattcgcttggctacagctgcattgaacagctgccccgcctagaaatgccaatgctgtttatgtatggcggcctgcgggactggacctttacaaacgcaggctattaccgaagatcgtgcagacatgccgaatttttcagattggaatatcagggacatcaattgccgacaaaacaatggaaaacgtgcaatgagctggtgacacggtttgtgctgacacatcattcaatatagaaaacgttggatctccttgcgttttctatattttattgacttttgtcaacaaaatcatagtaaaaaagatcctcaaatttcaaattaaaatagtgaagcattttaccgatcacaagctgccccggccgtctttctccattcagcacgcggctcagtgtggcgggtgagactccgatttccagcgcaagctgattaagggaataatcgttattaaccatatactgcaagacataatcacgtctaatctgtatcttttctactggcactttcctcaccttccattcctgaaaaacttttttctatacttttacattacggcttatgttaacttttgtcaatacatttccagtctacctattccctttagtcaataaacatactaaaatatgagtaacagtgagggacggggtgagatatatggaaagctttggcgaacaattacgggcattgcgtgaagagagaaagttaacagtcaaccagctggcgacttattcaggcgtaagcgcggccggcatctccagaatcgaaaacggaaaacggggcgttcccaaacctgccaccatcaaaaaactggcagaggccttaaaaattccttatgaggggcttatgtacaaggctggttacatcgaagaagtgcatgaagccagggccccttacgaaacgaagtgcaagctgcttgaaaaagcggaggcctatgacctgaaaaaccttgcgcttcttgagaacgaaaagtggcaatatctcaataaagaagatttgctcatgctggatcattatttttcgtttatttcagacgaagccaaaaaacggtctgctgatgactgactcttgatagaaatgtgaggcgatagaccatgtcaccgttcggacagcaattacgggagctgcgccgcgcccgcaaactgacagtgaatcagcttgcggtgtactcaggcatcagctcggccaccatttcaaaaattgaaaacggcaaacgcgggacgccaaaacccgccacgattaaaaaactggcagccgtcctgaaagtgccgtacgaaaacctaatggccgccgcaggccatattcaggcctttcctgaagaaatccgcgaagcatctgaaagctatcaatccgtttatgaaatttaccagacggctgtcactcgcggagcggagcacctcccgattttcaatagtcaaaaatgggaacatctctcaaagcaggatattgaaaatctcagcaaatacttcgattttttgtcttcagaagcaaaaaaacgcgcctcttcctcataatcccctgtttctctttctatattttatcaatcacgcttgcataccctccctcgttatttgcgttataatagtgacagacgaggtgaaaagtatgaaccaatcagaaatgtgtcctagatttgaaaaagcagtcgacatcttaagtaaacgctgggtcgctttaatcgtatttcagctcttgaacgggtctcagcgatttagcgaaattgaagcagcacttccaaatctaagcggcagagttctgtcagaacggctgaaagaacttgagcttgaaggagtagtgaagcgggatgtcatccctgaaactccggttcgcatcgaatattcattgactgataaaggaaaggcactagcacccattttaggtgagatttctaaatgggcgactgaatggattgacccttcctttcttgactaattgctaaaacggctctgatctcaaagatgagaaaagagccgttttttattttttcccaggtgaaaaaacgatttctcagccgatatatagtacatccacacattacgtttttaaaggagaccactatatgcgactgacgatttcccgcaaattcagcctggtatttttgacactgatcctgatcaatttacttgtaggcggaataggcgttcttaatatgcagcatatcattcaaaaaacagatgaaatcaacacaaaatggattgacggcatcaaaggaatcacttcaattaattatgtaaccgagcacctgtcttctaaagaaaaggactttctgatttatacagacaaaagcaaaatggatacacttgatcaagaaatgaatcaaatcatggaagacattaaccaaaagctcgataactacgaaaaaacgatctccactgataaagagcagaaactgttcgagcagcttcaaactgaagtgaatacctatatggatattcatgcgcaaattatcgaaagcggccgcacgaatgacatggacaaagcaagaggtttattggttcagactgaggccagctttgaggatatgaaaaaaacaatcactcagcttgttgacttaaatcaagaaggcagcaacacagcggtaaaagaaacgaaggccgtctatcataaagggctcatttacactgctttgcttgtggcagcttcgatcctcatcagcattttcatctggctttatatcacgcgaaacattgtaaagcctatcattcgcatgaaggaatctgccaatcatattgccgaaggcgatctgtcgaacgatatggagccgctcaactcaaaagacgagctgggtgatctgaatgaagcgctgcaaaaaatggtagggaatctgagagatattgtcggatattctaaagacatatcaagccgggttctttcttcttcacaggtgcttgcaaccgcaacgaatgaaacaagatccggcagcaaacatattaccgagacgatgaacgaaatggctgagggctctgaacagcaggcccaagacgccgtgacgattgccgaatcgatgaatgagttcactgaaagcattgataaagcctataatcacggcatcaccatcagcgatacgtctcaaaacgttctcgaactcgcggtaagcggaaacgaaaatatggctacgtcattacagcaaatgaaaaccatccatcatattgttgaagaagccgtgcataaagtgagatcactggaacagcattctcaggatatcaacaagctcgttcaagtcatcaacggaattgccgagcaaacgaatttgctgtcccttaacgccgcaattgaagctgcccgcgcaggagaaagcggcaaaggcttcgccgttgtggctgatgaagtcagaaagctggctgacggcgtttctgattccgtgcaggacattacccggattgtaaacgggacacagcaggagatccacactgtcattacgtacttggaaagcagctttacagaagtcgaaaaaggaacggaaaacctgacagacaccggacaggctatgcagcatatcaaacaatccgtcacccatgttgcagacagcattaaggaagtaacggatggcctgaagcagttaacaaaccaatcgattaccatcaatcaatcgattgaaaatatcgcttctgtatccgaagagtctgccgccggcattgaagaaacattttcaattaccgagcaatccgcccattcgatggatcaagtgcttctaaatgctgaagagcttgagcagctggccaatgagcttaatgagaagatgggtcagtttacgatttaaatagaaaaaagaggctggactccagcctctttttctattctatgcagctgattgaacatgtttcgccccggttctttttttcttcaccggacttaatgcccgctccagccaagccatgagcaaatccgcccctaccgccatcaccgcagttggtatcgctccggctagaataatcgcagttccgtttgttgcgtttgagccgcggacaatcatgtccccaaggcctccggcaccgacaaatgtgccgatcgctgtaattccgatggcaatgacgagagccgtgcgaaggcccgccataatgacagaaagtgcgagcgggagctcaaccattctgagtacttggaatttcgtcatgcccattgcttttcccgattctaagtaggcatgttcaatactgataatgcctgtgtacgtgtttcgaataatcggcagcagggaatacagaaataatgatagaatcacggtatttgcgccgagccccataacaagcattaagacggccagcatagcgagcgccgggattgtttgaataacgtttgttacggcaaacacccaggctgacaaacggcgaaaatgcgcgatgaggattccggccggaaccccgacgacagcggcaaataaaacgccgtaagccgacatgagaaagtggcggccgaattcatccatgacgtaactgccattctgcgcgtaatacgtcattaactgttcaagcacgttcattgacctcttccccctttcacgattcgaagtagtgatgtttttctaaatattccttggcaacgacagacggttctttgagattgccgtcgacttcatagttaagctcctgcatcgtggttgtgtcgatttttccgagcattttcttgatgatgccttcaagctcaggatgttctttgagcaccttttccggaacaaccggagagcagtcgtacggcgggaaaaattgtttatcatcctttagcattttgagaccataggacttgattcttccatcggttgaatacgcaagcacaatgtccatttttccgcttttcaccgcgtcgtacacaaggccgatctgcatcggatacgtgccgccgaatgtcatgccgtaggttttcgtaaaatcctgatagccgtttcctttgagcttcatccaatagttatcaacgcccagctttaattgcggcgcccattttttaacgtctgatacggtctctaaatggtattggtcggccagttccttgctgactgtaaaggcatatgtattatcaaacccgtaggagttataccattttaaattgtatctttttttaaactcccgctgagtaagcgccagcgctttgtccggatctttttcaggttccattctcaacgtgcctgtcagcgcgtctcccgtatatcttgtggccgcaatgtcaatttccccgttcattaaagcctgctgctgcaccgcgttggagccaagatttttaatcgttgttgttttgagatcagtatggtgttcgatcaactggccaagcatactagcgatgatttctgattcgctcatgctttgcgcgccgattttaatggtctggtctgcagcagcgctgagaccaggaagcgaacagccgctcagcgtcagcgttgccgcaagtgctaaacctatgattaatttgaggtattttcttttcatgagccccctccttatgacaattcattcaatctctgcatgccggcaggtgtcagttttcgttcagcaactgcaagcacataatcaatcacaattgccaatatcgtgacaggtaccgcgcccccgatgatatattccggctgatataaattcagtccgataaaaatgtaatcacccaatccgccgcctccgataaaggaagcaagcgtggcccagccgattaagtaaatcgtcgatgtcctgattcccgccatgatcactggcgcggcaagcggcagctccaccaagcggacttgttcagccggcgtcattccgattcctttaccagactcgagcagatttttgttgacgccgcgaatgccggtatacgtgttgcgaagaatcggcaatacggaatagaaaaacaaagccacaatggccggaaccttccctacaccaaggagcgggataaaaaaagcgaggatggccagactcggcagcgtctgaataatattgacaatgccgataatggtgccggctccttttttcattctggtaagcacaaccccgagggggacggcaaccagcacgcctaagatcacagcaatgagcgatatcgtaatatgctcgtatgttttataaagaagctcgcccccattggtttgcaaaaattgaacaatatgatgcatgacttatcgcccctccctatgacaatgctgcgagctgcttttcttctccccagagggagtcatacacgatgtcgaccagacttgccctcgtcacaattccgatcaggcgtcggtcttcatccacaacgggaacatatttgacaccccgttttaaaattttgcggaccgtgtcgcgcagcagtgtgccgcccagtactgtgtatatatcttcatgtaaaacttcactgacgagattggcctttttccggcattgatcaatgatttcaacatcgacatagccttgcagaccgcgctcgtcatcgacgaccagcaatgaatcgacccgttcctgcctcatcagctgaatggcctcagaaagcgttttatccgcggtgatcgttacaggctgtgtgttcataatctggtcaacccgttcaacatccgggctggatgactgaatcagccgctccttgccgataaattcctcaacaaattcgtctgccggatttcttaaaatgtcatcgggcgttccaacttgaacgatttctcccgcttttaaaatcacaatccggtctgccagcttaatcgcttcatccatatcgtgggtaacaaatacgatggttttatgtaaggttttttgcagttttttaaattcttcctggagggaatccctcgtaatcgggtcgagtgccccaaacggttcatccattaagataagcggcggctccgcggcaagtgcccgtaatacaccaattcgctgctgctgccccccgcttaattcatgagggtaacggtctacatattcaggccccatatcgaccaattttaaaagctcacgcgcccgctctttccgctgctgctccggccatttcagcagttttgggacgagtgagatattctgctgaatggtcatatggggaaacaggccgatctgctgaatcacatagccaattttgcgcctgagctctacaggatcctggtccatgatgttttcgccgtcaatgaaaatcttcccggcggaaggctcaattaatcggttaatcattttcattgttgttgtttttccgcagccgctcggcccgataaagcagataaattcgccttttgcaatcttaagatttacgttgttcacggcttttttgccgcccttgtatgttttcgagacattttctaatgtcagcaaacatcgcacctccaaaattaagtttattcaatttgttcagtttaaatttaatttttcagacaattgaatgcttcccattatagaataaagtttataaaataaaaagtttacaatttgttcatattatttataaagtatgtgtaaacgctgatttacccgcattgacgtgtgttgatctccttattgctccaatttcctgccaaattctcttttgacagcattttcgccgtatcaaaaatgtggtatattgacatcggaattgttagctgaaaggatgaaaccgttggagaaagatccgttaacgatcattgaacaagccgaggaccattttatagaaaaaatcgcggaaaacatgcatgcatttggaatgccctctaccgtcggacgagtgctgggcattatttatatgaatcgaaaaccgatgacgcttacggaattatctgaggccaccggcatgagcaaaacacgcatgagccaggtagtgcgggaaatgcttgatgccaacattgccgagaaggtgttcgaaaaaggcgtgcgaaaagatttatatgaggttgagcaggactactatcaaacatttatcacgctgttttcagccacctggagcaaagtcgtcagcaaaaacaaaatgatgcataaaaaactcaatcgggagctgcttagcgtgttggatgaagagcttactcctgaagcggaagaaaaagtgaatgagctgctgaaggaattaaaggaatggctcgattattataattggctcagccgtttgattgagttttttgagagcgaagaaatttttaaatatgtgccgaagccgtaaaaaacgccctgtcattacaaggcgttttttcttatgcggcacctgccaggtttttcttttttctctttttaatcgggcttaatgctcgttcaagccagcccatgaccaaatcggcaatcaccgccatcagagctgtggggatcgctcccgctaatataatcgcggttccgtttgtggcgtttgatcccctgacgatgatgtccccgagaccgcctgcaccgacaaatgtcccgatggccgtaatgccgatggcaatgacaagcgcggtgcgcaggccggccattatgaccgaaagcgcaagcggaagctcgaccatccgcagcacttgaaattttgtcatccccattgcttttccggattcaagataggcgtgctcaatactgataatccctgtatacgtatttctgataatcggcagaagagaatacagaaataatgacaatatcactgtattagcgcccagccccatgacaagcatcagcacggcaagcatggcgagagccgggatcgtctgaatgacgttcgtgaccgcaaaaacccatccgcttaatcttctgtatctggctatcaggatgccgagcggaattccaacaatggcggcaaataaaacgccgtataccgacatcagaaaatggcggtaaaactcctgcagcacataaccgccgttttgcgaatagtatgtgccaagctgctgtagtacttccatatgatccacctcttttcttagtcaaaataatgatgtttctctaaaaattcctttgctacgacagacggctccttcagcttgccatccacttcataattaagttcctgcatcgtttccgtgtcgatttgcccaatcagcttattgatcacaccttcaagctccggatgcgccttaagcaccttttccggaatcaccggtgaacagtcatacggcgggaagaaacgcttatcatcttttaagattttcaagtcataggctttaatccgtccatccgttgaataagccagaacggcgtccattttcccgtttttgactgcgtcatagacaagcccgatctgcattggataagttgtgccgaattcaaagccatatgtgctgacaaagcctttatacccgtcaccttttcgtttcagccaagcattgtcgacgcctaatttatattgggaggcattttttttcaggtcggacacggtgttaatatgctcattttccgcaaacttttttgttacggtgaaggcatacgtgttatcaaagccgtaggaatcaaaccatttataagaaaagcgcttttgaaactcgttctgcacaatgttcagcgctttttttggatctttctccgcttccttgccgagggtgcttgttaaatctgttccggaatagcgcgtggctgaaatatcaatgtcaccgcccagcatcgcttggtgctgaacatagtttgagccgaggtttttcactaaagcggtattcaaatctgtatcatgttcaataagctgcgcgatcatattcgctaaaatttctgattctgtcatgctttgcgccccgattttgatcgtgtcgtcagaagcgccgccgagacccggcagagagcagccgcctagcagcatgacaaagacgagagcaaacgcgccaagccatttgatttttgtcgttttcaacagagccaactccttacgaaacttccttcatcccttgtaatcctttcggcgtcacctttcgttctgtcacggctaggacataatcaatgataattgccagaattgtgacaggcacggcaccgccaatgatatattcaggctggtataggttcaggccgataaaaatatagtccccgaggccgcctcccccgataaacgacgcaagtgtcgcccagccaattaggtagatcgttgatgtgcggatccccgccatgatgatgggaattgccagcggaatttcaacgagccgaatctgctcccagcctgtcatgccaatccctttccccgattccaggaggtttttatttacacctttaatgccggtatacgtattgcgcaagatcggcagtaccgaatagaaaaataaagcgacaatcgcaggcacttttcctacgccgagaagcggaataaaaaaggctaaaatcgccagactcggcagggtttgcacaatgtttacgaaaccgataaccgcacctgcgccttttttcattctggtaagagcaacgccgagcggcactgcaacgataatgcccaatacaacggctatgagtgaaatatataaatgctctcctgttttatacagcagctctccgccgttcgtttgcaaaaaagtcatcatttgattcatcttaaaagagctcctcccctggtcagatcgtcatgagctggttttcctcgtcgccccaaatggaatcgtacacgatatcaacaaggctcgctcttgtcacaatccctgctaaatggttctgttcatcgacgaccggaacatacttgatcccctgcttcaaaatttttcggactgtatcgcgaagtagcgcccctttttgaacggtatatatatctgagcggtatacatcgccaacgatgctcgcttttttgcggttttgatcaatcatttccacatcaacatagcccttcagcacgttttgccggtccacaacgagcagcgagtcaacacgtttttctctcatcagctgaatcgcctgagaaagcgttttgtccgcagataccgtcaccggcgttctgttcatcatttgctctacccgctcgatatccggtcttgactgaatcaggcgctctttcccgataaattcttcaacaaactcatttgccgggtttcgaagaatctcatcaggtgtgccgacttgaacgatttctcccgcttttaatatcacaatcctgtcggcaagcttaatcgcttcatccatatcgtgggttacaaacacaatcgttttgtttaaggttctctgcagttttttgaattcttcctgaagggaatcacgcgtaatcggatcaagcgctccgaacggttcatccattaaaatgagagggggttccgctgccagggcgcgcagcacgccgattctctgctgctgtccgccgctgagctcatgcggataacggtctaaatactctgggcccatatccacaagctttaacagctcgcgcgcccgttctttccgtttttcctcaggccatttcagcagctttggtacgagtgagatgttctgctggatggtcatatgggggaacaaaccaatctgctgaatcacatagccgatttttctcctcagctcaaccgggtcctgttccataatattttctccgtcgataaagatccttccagacgatggttctatcagtctgttgatcatcttcatcgttgtcgtttttccgcagccgctcgggccgataaaacagataaattcaccttttgcaatatctaaatcaatgctgttcacagcttttttgccgcctttatatacttttgacacttgttccaatttcagcaatccgtgcacctccgcaggtttcctttaaattttctgaaaagtataatccttattatagtttgaactttgtaaaataaaaagtttacaatgtgttgaaattatatgttatttatagattatttattgttatgaccgagacggaaagggtgttcttacaattacgccggatacctcccacttcctctgcattcagctattttcaacaccaggaagaaatatgatatattgacaccatcaattgccatttgaagggatgatcagctgtgaaaaaaaccgctctcgacatcattgaacatgctgaagagcatctcattgagaagattgccgaaaatatgcatacgtttggaatgccttcaactgtcggacgtgtgctcggaattatttatatgaatcgaaaaccaatgaccttaagcgagctctctgaggcaacgggcatgagcaaaacacggatgagccaggttgtccgggaaatgatcgatgccaatatcgccgaaaaggtgtttgaaaaaggcgtacgaaaagacctttatgacgtcgagcaggattattatcaaaccttcatttctttatttgcggcgaattggacaaaggtcgtgagcaaaaacaaagtgctgtataaaaaattaaaccgggagctgagtgatcttttacaaagggacgggcttaccccggaagcggaagagaaagtcaatcagctgctgaatgaattaaaagaatggcttcattactatgattggctgagcaggttgattgaattttttgagagtgaggaagtctttcggtacgtgccaaaaacaaaagaaagcagctctctaaaataagggagctgctttttgcatcatgaggttaagatcggaaacatgcctttcagccccgcaccaatcatcccgaccgcaaccacggctaagattaatcccatcagtctggtaatcacattcatctcggtttttccgagtttgctgctgataaaagcagaatagtggaaaaagagaaaggtcagggcaataacggcggctatgccgatcgtgacagccgcataatgaccaatgccgctatgaccggcggaaaggctcatcactgttgcaatcgttccgggcccagcaatgatcggaatggataaaggtgtgactgatatatccgctttttccttgctttccttatgttcatcatggtgaagagattgcacgtgtgattctttcgcattcaatagattataggcaatgccgaaaatgaatatgccgcccgccactcggagcgcgtaaatgttgatatcaaacagtttaaagataagatgaccgaaaaccaaaaaagctgcgagaataaaaaaggataaaatagctgccttccgggcaatcgcttttctttccgctgcagtatagccttctgtcagcgtcagaaatatcggtacgtttccgatcggattcgatactgcgaataaaaaatgaagacgtgaacgataaatgagaacatcatatacctccttgttgatagtctctgcacaggaaatagaattattctccacccttttacccggaggcgatttcccggtaaacctttatagcctgtcagaaacgcgccatgctacaatgaagtgacaaattgaataggaaggacgtatacagatgttcaaaaaaattgcggcagatgccttgggcttatctgatatcggaaaaattatcgtacctcaggactatgacaaaacagacgcagacgactatgtcatgcatgaagataatgagaaaatttatttcttgattaaaacaaaagcagacgagtattgctttacgaacctggccctgatccatgtagacggcgaacgcgccacttcctcgaaacgaacgttgaaacgctatccttattcgcaatataaaatctctgacgtttttcttgaaactgccggaaaagtggatttggatgttgaaattaagttcaagctgggcggtgaacaattcgacattgatgtccacaaagaccagattgaaaagttaaaagacctttataaagcactgcttcgcatcgctgaaacaacctatgaaaatgacattttaatcaatcaagcggagcaaagcttagataaagcagtgacgattcttcaccatacccgccctgagcacgtcaatattgaaacgcaatacaaagagctgaccgaattcggattcacttggctgacatccgttcgctcgcagtatcatattaaggattttggggatgtatttgagaaatatattaataactagataaaagaagacacagctgctatcgtgctcgtgtctttttttgtatgaatattgattactttacaacttttttcttttataataaaactattagtctattttccctatattacagataaaggagttattttatgtattgtcctcaatgcggccatcaaacagatggcggaaatttttgtgagaaatgcggatcaccgctccccggtcaatcaggccaccagcatgcagctcaaactggagccgctgcaaagcaagcagcaaaacagttcggttcatttgtcttatccgtcctgaaacgcccttatcaggaatgtaaagcaacaggcggagaacagctgatcagcgcaatcattacgatcgttcttttcagtttgctgacccctttgatgttttatattcttttttcagacggtcccgaaagcgtaagctttacagcaatcttcttagagccaaccatttattttattttatttctatttggcctgcatgcatgcatctttttcgccctgaaaatcgcgggaaaccaagtatctttcaaggattcattctcaagattcggagcgtttctcataccgtttacggctattttgattcttgcccttttcttctttttattacatacagacatttgctttaccatattagccgttggtttaatcggtgcattcttcgccattcctcctgcgatgctgagcagttaccagcattcatataaagggaaggttgatgtcatttactcaacgattgtaatttatctgatcatctgcgttacatttcagcttattatcgaacactatgtcaaagaaattttccgttatatgctcttttaaaaacaatcccatcacctgctggtgatgggattgttttattgaatagacgttaagtaaattcttccgttcttcactacgccggtgtaggtccagttatatgttctgagctttggactgccgcctgattttgtgatatagaattcttcatacgtcttaatcgtgatagccgacccattttggctccagcttttcacttcatagttattaaagtcttctgttgtcccctctttatttaatttcgacacgagatgctgctggtcggaataaagggaactgcctttttcaaggctgtcttccatcagtgagaaattattttgattcacggcatctgcctgactttgcagataactgcccataaataatgtcacttgttcatctgtaacatcgccgcttgcagagctttcactgcctttgtttttcgagccagcccaggcggaagtgtatgtctctggtttatcatttttgattttctttatatttgtgcctgcagattcgaatgttgattctgcatcttcgaaaatccactttttctgttttttatcatatgaaagaagatattcataactcggactgtcgtcagtcatttcagattttgtatagtcgttatacgaagaagactggtgaagttcttttcctgttaccgatacctgccacgttccgtcgtttttctgagagagggcaaatgtgtccaggtcaaaatcagtttccaagtatctatcttttaagtatgaatccgcgcttttcatagaatcgacggtgtccttcgtctccgccttccaattggcacttgcctctgtcatctgggctgtattcccatcagatagagctttggagtattgttttgttgttttgacaattgtgttcataatctgttcctgtgtatcttgatcaggaattaacgttaactccatttctttatcatcgatcggaacgccggcagtttttgtttttccccacggaaattctgcctcgactgaagctgtcattgatccatctgtcagcagcggaccatatgttacggatttgaacggatctttatgaattgacttgccgttaatcagcaaatctcccttcccgctcttgatgtcatccgctaagctgaatgtcacatcgtctgcttccaatgagagatcaacacgaaagctgctatcgccaatcgcctgaatgtcttcctttttcacaaggtcaacgacatcgtttttcagtttggctgagactgtatattcgccgggaatgtacggaccaagggtttgtgcttgatctgctttctttacagatccggcttcctctttattgacatatagatcggtatttttataattgctgctcacttcaaaataaacaggtgctacctttaagtcataatggtcaaataccagcaggcttttcccgtctttttctgcatatacgatatccttctgggctgtttcatcccgcagcgatgcaaaaagttcatcttttttgtctggatgatccttcaaatatgtaagaaacggttttacattatttttagtgagtttaagattgtcatttaccggtgtaagcagagtcgcgatttggtcctgatccccatcatttacggcctgttcaaacttgtctactaacctatcctttgaagtaaaatacgctccggttttatatgcggcgaataatataacgcacgccgcggcaatgctgctccataaaatgatggttttcttagggatcggttttcgcggagcctgccttgtttctgcagtgctagctgtttcttgatttgcctgtttgctaccccctccgatcggggtgccgcattgtttacaaaacttggctccttcattattctgggagccgcaattcttacaaaaaaacatgactttcctcctattctactaatttgataacatttactgcttttcatattttataataaaacagaatgaaattgggaacgaatgaaaaaattaaatgtctatcagactaaaaaggtggtacgaatatgcaaaagctcaggattgaattaggagaagaaacaaatgacgaactatatgatctattgctgctcgccgatccatcgaaagacattgtagatgaatatcttgagaggggagaatgttacacagcttgggccggtgatgagcttgcaggggtttatgtattgctaaaaacaaggccgcaaacagttgaaattgtaaatattgcggtaaaagaatctcttcagaagaaaggctttggcaaacagcttgtacttgacgccatcgaaaaagcgaagaagctgggggcggacacgattgaaatcggaacggggaattcgagcattcatcagctttccctctatcaaaaatgcggattccgcattcaggcgatcgaccacgatttctttctcagacattatgatgaggacatttttgaaaacgggattcaatgccgcgatatggtaaggctttatttggatctctgaaagcataaaaaagccgccgagagaaaatcccggcggtctttttattacttgtttaagttgtagaaagagttgataccgtggtattgagcagtttcagccaactgatcttcgatgcgaagaagctggttgtatttcgcaacacggtccgtacgagacggagcacctgttttgatttgtcctgcgtttgttgccacagcgatgtcagcgattgtgctgtcttcagtttcaccagaacggtgagagataacagctgtgtagcctgcgcgtttcgccatttcgatcgcatcgaatgtttcagtcaatgtaccgatttggtttactttgatcaggatagagttgcctacgccgtttttaataccttcagaaagttttttcgtgtttgtaacgaagaggtcgtcaccaacaagctgaacttttttgccaagacgctcagtaagaagcttgtggccttcccagtcgttttcgtcaagtccgtcttcgatcgagatgattgggtatttagaaacaagctcttcataccagtcaaccatttcagcagatgttttcacaacgccttcgccagacagatggtatttgccgtcttctttgttgtagaactcagaagatgcagcatccatagcaagtttaacttcttcgccaggtttgaagccggctttttcgattgcttcaacgattgtttgaagcgcttcttcgttagaaccaaggtttggagcgaatccgccttcgtcacctacagcagtgtttaagccttttgcgcttaatactgatttcaggctgtggaagatttgagcgcccatgcgaagtgcttcacggaagttaggagcacctacaggcatgatcatgaattcttgaatatccacgttgttatcagcatgctctccgccgtttacgatgttcatcatcggtacaggaagcgtttttgagttgaatcctccaaggtattggtaaagaggaatctgtaagaaatcagcagcagcacgcgcacaagccatagatacgccaaggattgcgttcgcaccaagtttacctttgttttcagtaccgtcaagctcgattaaaagctgatcgattgcgttttgttcagttacatcaaagccaagaagctctggagcaatgatttcgtttacgttgttaacagctgttaacacgccttttccaaggtaacggtctttgtcgccgtcacgaagctcaaccgcttcgtattcacctgtagaagctccgcttggcactaatgcgcggccgaaagctcctgtttctgtatatacttcaacttcaactgttgggttgccgcgggagtctaatacttcgcgtgcataaacatcaacaatgtatggcatgagttttgtctctccttttgattttcaaattatttttgaattaaagatgttcctgtcatttctttcggtttttcaacaccaagaaggtctaataacgttggtgcaaggtcgcctaggattccgccttcacgcagcgtaatgccttctttcgttacaatcacagggactgggtttgttgtatgcgcagtgtgcggttcgcctgattctgtaatcagaatgtcagcattaccgtgatcagcggtaatgatagcgtgtccgcctttagcaaggatcgcgtcaacgacttcgcccaagcattcgtccactgcttcaattgctttaattgttggttcaaccattccggagtggccgaccatatcagggtttgcgaagttaagaatgatcgcgtcatgcttgtcagcttcaatttctttgacaagcgcgtctttcacttcatacgcactcatctcaggcttcaagtcatacgttgcaactttaggcgagttgatgagaatacgctcttcacccgggaattcagcttcacggccgccgctcataaagaacgtgacgtgcggatacttttcagtttctgcaattcgaagctgttttaacccgtgctgagataatacttctccgactgtgttatcaagatttatcggtttaaacgctacatagccgtcaactgtttcactgaagtgagtcaggcagacgaaatacaggttctttggataattctcgccgcggtcgaagtcacggaagtctttgtttgtgaacgtgttggaaatctggatggcgcggtccggtctgaaattatagaaaatcacagaatcgccgtcttggattttcgcaacaggctcaccgttttcttttgtgatgacagatggaatcacgaattcatcgtagataccatttgcatatgaatcatcaacaacatccagggcgctgcggtaagatgggccttcgccgtacgccattgcgcggtacgctttttctacacggtcccagcgtttgtcgcggtccatagagtagtaacgtccggaaatgctggcgatttcacctacaccgatttccttgatttgatcgttcaactggttgatgtacgttttcgctgtctgcggacctacatcacggccgtcaaggaagccatggatataaacctctgtcagcccttcttttttcgcaagctttaacagtgcgaataaatgattgatatggctgtgcacgcctccgtcagataaaagaccgaacaggtgcaaggctttgttgttttctttcgcgttgctgatcgcgtcaaggaatgtttgattgcgttcgaactctccttcgcgaatggcaacatttacgcgtgttaagctttggtacacaatacgtcccgcaccgatatttaagtgacctacttcggagttccccatttgcccttcaggaagacctacagcctcgcctgaagcagtcaatgtttgatgaggatactggttccaatagcggtcaaaattcggttttttcgctaaagcgactgcgttccctactgtttcgttacgtaatccgaacccatcaagaatgatgagtgcagctggttttttactcatattgaccttcctccaataattgaacgaatgactgtggctcaaggctcgcgccgccgaccaaagcaccgtcaatatcggactctgccatatattctttaatgtttgcaggctttacgcttccgccatattggatgcgaagcttgtctgcagcttcttggctgaagctttcagcgacggttttacggatatgcgcacacacgtcattcgcatctttcgctgtagaagatttgcctgttccgattgcccagattggctcatacgcaataacagaagcagcaacttgttcttcagaaagaccagcaaggccttttttcacttggtcagcaacaagatcatttgttttgccggcttcacgctcttcaagcgtttcacctacacagatgatcggcacaatgccgtgtttgaaagctgcgtgtgcttttttgttaactgtttcatcagtttcagcgaacatttcacggcgctcagagtggccgatgacgcagtagtcaacgccaaggtctttcagagcaaccgggctgatttcgcctgtgaacgcgccgctttcttcgaagtgcatgttttgagcgccgacttttaggtcagtgcctttcacagcagaagcaagcttttctaagaaaagcgctggcgcgcaaacaacagcttcagctttgtctgctgctggaatggaagatttcacttcttcaacgaagctgacagcttcgccgagtgttttgttcattttccagttaccggcgataattggttttctcatctgttccacttccttatagcagttttgagattatttatcgttcagtgcagctacccctggaagctctttgccttccataaactcaagggatgcgccgccgcctgttgagatgtggctcattttgtcagcaaggccgaatttttcaaccgctgccgcagagtctcctccgccgatgacagagtatgtatctttcgcctctgccaatgcttccgcaaccgcttttgttccttgagcgaacaagtcgatttcgaatacgcccattggtccgttccacacgacaagtttgctgtttttgatgacgtcagcatacgtttcgcgtgttttcgtaccaatgtcgattgcttctaaatcactagggatttcagagatcggcacaattttcacgtttgcatcgttagagaaatcatctgcaacgagtacatcttcaggcatgtagaagttaacgcctttttctttagcgcggtccataaatgatttcgcaagctcgattttatcctcttcaagaagagatttaccgacttcatagccaagcgcttttacgaaagtataagcaagacctccgccgatgatcaggttgtctactttatcaagaagactctcgattacaccgattttgtcttttactttcgctccgccgatgatcgctgtgaacgggcggtcaggattggaaaccgcttttccaagtacatcaagctctttttccattaagaaacctgcaactgctggcagatgctcggcaattccagctgtagatgcgtgagcacggtgggcagcaccgaatgcgtcatttacatatacatctgcaagctcagcaaatgcttttgcaagctcagggtcatttttctcttcaccaggatagaaacgtacgttttccaatacaagaacgtctccgtccttcatctcagaaatttgtgcttttacagcatcgccgtatgcttcatccgcttttttcacttctttgccaagcagttcgccgagacgtgcagcgacaggagttaaacgaagctcctcaaccacttcgcctttcgggcggcctaagtggctcgcaagaaggactttggcgccttggtctgcaaggtgtttgattgttggaagcgcagcacggatacgtgtatcgtctgttacttccccgtctttcattggaacgttaaagtcaacgcggcagaatacaactttgccttttacgtcgatgtctttgagagtttttttattcatgcctaggagatcctccttcaaaatggtttgcatacagcacgaaaaacgtgaaaccgtctgttcaagcgataacgccgctagggcagatcgcagtctttttcggcacagggcagttcgtctaaaagccagggcagcggccttaggcgaaagcgccggcaaagctgcttaaaacgcggtcgtttctctatcacagagcgttttctgaaagccggtcttcatggaaaaagggaaagggagtccgtccccttcccttgtccgctttcattatagcgcttctattcgaaagaaccaagtcaggtcctttttcagctataaattaaagacctttttttgcgatgtaagctgcaaggtcaacaacgcggttagagtagccgctttcgttatcgtaccaagagattacttttaccatgctgccttccataaccattgtagaaagagcatcgattgtagaagagtttttgtttccgttgtagtcgccagaaactaatggctcttcgctgtagccaaggattcctttaaggtcgccttcagccgcttctttaagagctgcgtttacttcttcagctgttacttcttggttcagttcagcaaccaagtcaactagagaaacgtttggagttggaacacgcattgctccaccgttcagtttgccttttagttcaggaagaactagagaaactgctttagcagcaccagttgatgttgggatgatgttttcagctgctgcacgcgcacgacggtagtctttgtgcggaagatcaaggatttgctgatcgtttgtgtaagagtgaacagttgtcatcataccgcgtttgatgccgaatttatcgttaagtacttttgcaaacggcgcaaggcagtttgttgtgcaagatgcgttagagataacatcgtggttagccgcatcgtatttatcttcgttaacacccataacgattgtgatatcttcttcgttagcaggagcagagatgattacttttttcgcgccagcttctaagtgtttcgcagcgtctgcgcgttttgtgaagaaaccagtagattcaactacgatttcaacgccttgtttgccccagctaagtttagcaggatcgcgttctgcagaaacttcaattgttttgccgttaacaacaaggttgttaccgtcaactgaaacttcagcgtctaattttccgtgtacagaatcatattgtaaaaggtgagccagcatgttagcatctgttaaatcgttaaccgctactacctcaacttcaggattgtttaatgctgcgcggaatacgttacgtccaatacgaccaaaaccgttaataccgacttttactgccatgattgtttcctcctttaaataagtgagagatatttatattgagggattattcatcccttaataacttctttgcggctccttcgtctgtgacgagaaccgtgttgcgtggctttttaaagtaagcctcgatcgcctcggcttttgatgatccgcccgctaccgcaataatatcggggatggcgtctatgtcatccagctgcattccgacagaatgcactttgtgaaccacttcgccgtccgcgttaaaatagtagccgaacgcttccgtcaccgcgtcgttatcatctattttctttaagtcttctaaaggcgtgtttctgcgctgagccatagttttagcttcgccgattccatgaaccagcatactcgctgatttaatggtgttcagcacctctttgacagaaggctcttcaataatagatgaataggcgccttgtgacagctgtcccggaacaaacaaaagccggtaagtgcctgaagccttctccgccatatgcgcgcatatggtgttcgcctggtttttcacgtcttcgcctaaaccgcctcttgcaggcacaaacaaaagctcgcggtttttagaatccggcgtcatcatttcggcgacagcttcaattgtcgtaccgccagttacagcgacgatatttttgcctgaaaatctttttttcatacatgcgacagccgctcttcccatttcttttttgacccatggggattgatcgctgtctccggatacgataatggcatcctttagatttaaacgttcttttaatgtcttttccaaaagagtcaaacctaaaacatctttcatcgtatcttccaaaacagaaagcagttcatagccctcttctgtcaatgtcatgccgtttgtcttaatatcgaccaggttctgttcctttaaaaactgaacctcgcccctcagcacacgctcgctgatttcgagactggcagacaggcttcttcgcccgatgggttctgtcagcctgatatactgcaagatttcaaacctcttttgcataacgagcagaagatcaggcaataattttttttgagcttgtattaactggttcatgactcaaacgttccttccttttttgctggacgttatatgtcccgctatgacaaaaaacgtcccgtcatagccaaaaaaaatcatttctgctttctttaattattttaacagggtggaattgtttattcaactgttaagagccaattcatcgacaatattcgcagagttttcatgccgcgtcgttttatccagcaatattttatcctatatatctttatcttatacagaaagcgccaaatggtgcatcccaatataaacagcccttcccgtagaaagggctgtttcattaaagcgttttcattttatccaaagcttttcaatttcctcgagcgatttgttcttcgtttccggacagatcgtaacgacaaacaggaaacaaaggatgttaatcaccgcaaagatccaaaatgtataggcgagcccgaaagaatcgatcatcattggcacaaactgtccaatcgcccagtttgctccccataaaaagatggtcgcaatgcccgcggcccgcgcacgcagatggttcggaaagatttcagaaatcataatccatgtgatcggtccgaccgagacacagaaagcagcgacaaaacctaatataaggacgatcatcatgatcccgcttgttaactcaaagtaaaacgacgtcccgattaaaatcataaaaatagccataaaagcagaaccgatggacatcagtttttttcgtccgactttatcaatcagcaacaccgcaataacggtaaagatgacttctacaacaccgacgatacaagttgtcacaaatccggcgttttgcccgaatcccatcattttaaagatttccggcccgtagtaagtaatcgcgttcatgccgatgacttggttaaagagcgccagcaggattccaatgacaagcgcctttctgagccccggcttaaacagctgggagagcgaccccatttgttctatttttaaagagttctcaatgttctttaattcttcttttgcaacagtttctccattaatacgtgtcaggatctttaaagcttcatttgttttgcccgctttcgccagccatctcggactttccgggacgacgagcaggacaaggaaaaagatgacggacggcaccattccataagcaagcatccatctccagccggtgtgcacgccccattcgtatgttccggaccgctgcacagctagattaataaagtatgtagcggaaatacccagtatcgtaaagagctgatataaggaagataaacttccgcgtatggcgggcggtgccgcttctgtaatatacgtaacagagagcgatgagcccatcccgattcccagccccccgataatccttgcaatgattaaggtggacacgtcttgagaaagcgctgaaacgattgctgatatcgcaaataacaaagcggctgtcattaaaatttttctccggccgaatctgtcacttaaaaagccggatatcccgacgcccacaactcctccaatcataatgcttgaaatgacaagtccctccataaacggactcaggctgtataaatctttcagaaaaccgatggcgccagaaatcactgccgtgtcatagccatacaataagccgccaagccccgccgcacatgagatcaaaatgacaaatcccattgaatggcttcgtgttacaggaacatttggttctaattgagttggagtattcttcatttccctgccctcccgaatgttgagtaaagcgttttcatttaaaccttaaattgtacgtacttatattaaaatttaacgaaaattacatttaattagtacgtacaaatatagaataatcttgtttgcattttctgtcaatgttttcttacaaagaacgctgtgatatactgaaatttgtccgtatacattttggaggaatggatatgttaccaaaatacgcgcaagtaaaagaagaaatcagttcttggattaatcaaggcaaaatactgcccgatcaaaaaatccctaccgaaaacgaattaatgcagcaattcggcgtcagccggcataccatccgcaaagcgatcggagacctcgtatcactaggtctgctgtacagcgtgcaaggcggaggcacctttgtcgcttcacgctctgctaagtcagcgctgcattccaataaaacgatcggtgttttgacaacttacatatcagactatattttcccgagcatcatcagaggaatcgagtcctatttaagcgagcaggggtattctatgcttttgacaagcacaaacaacaacccggacaatgaaagaagaggcttagaaaacctgctgtcccagcatattgacggactcatcgtagaaccgacaaaaagcgcccttcaaaccccaaacatcggctattatctgaacttggagaaaaacggcattccttttgcgatgattaacgcgtcatatgccgagcttgccgcgccaagttttaccttggatgatgtgaaaggcgggatgatggcggcggagcatttgctttctctcggccacacgcatatgatgggtatttttaaagctgatgacacacaaggcgtgaaacggatgaacggatttatacaggcgcaccgggagcgtgagttgtttccttctccggatatgatcgtgacatttacaacggaagaaaaagaatcaaaacttctggagaaagtaaaagccacactggagaaaaacagcaagcacatgccgacagccattctttgttataacgatgaaattgcgctgaaggtgattgatatgctgagggagatggatcttaaagtgccggaggatatgtctattgtcgggtacgatgattcacatttcgcccaaatctcagaagtgaaactaacctctgtcaaacatccgaaatcagtgcttggaaaagcagccgccaaatatgtcattgactgcttagagcataaaaagccgaagcaagaggatgtcatatttgagcctgagttgatcattcgccagtccgcacgaaaactgaatgaataaaaaaagcaatgtatgggtctccccgctacattgcttttttttatagctgttatctgttgttccaaacgtcagcgatgatttcaaacgaacgcattctgtctgcgtgttcaaaggtttctgagttaaccataatttcgtcagcctgtgtcgttttgacgaaatcttcaagcttcgccttcacttcttccggacctccgacaatcgtggagctcagctgctcattgaccatcgctttttcatacgggctccagatttgatccatatcctcaacaggcggtttaagctggttcggcgtaccgcggacaagatcaagaaacctttgataatgcgaagtcgcaaggtgctgcgctttctcgtttgtatctgccgcgataatggtgacaccgaccatcgcatacggttcgtcgagcacgtctgacggcgtgaaggaattgcggtaaagctccaatgcaggaaccgtattcgctggtgaaaaatgagcggcaaaggcaaacggaagacctagttcacctgccagacgggcgctgaagccgcttgagcccagcagccaaatcggcacatctatgccctctccgggaatggcgcgaacttgattgcgcacatttcctgacggtttaaaataattgcgcagttcctctaattgttctggaaaatcctccccgctgttgatgtttctgcggagcgctctggctgtcaattggtctgttcccggcgcacgtccaagccccagatcaatccgcccgggatacagtgtttccagtgtgccgaattgttcagcaatgactaatgaagagtggttcgggagcataatgccgccggaaccgacgcggattttcttcgtgcctccggcaatatggccaatcaaaactgcagtggcggagcttgcaacaccttctatattatgatgttcagcaagccagtaacggtgatagccccattcctctgcccggcgcgccaagtccatgctgtttcggaatgattctgcaatcgttcctccctgaacaaccggagataaattcaagacagaaagcaaggtatctttgcgttggttgttagacatattgttctcctttgcaaatgtgttatcagtaaacagcccaaagctgtcaggtcatgattgaaagaacttctatcacaccataacacaactgcattcaggaataaaagaattttattcgatgaaattcgaacaatgtaaaacgaacggtttggcccgctattctgctccaaacagctccttagccatctcaataaagagcttagccgccagagaagcctcctttagcgacggaacagcaagctgcacatcacggtatacctgcgggtccaattcccgggtcaccacatgctccggaagcggcatccccgacatggacatttctgataaaatcgcgagacccaggccttctctgatcatactgatcgaggtgttgatgttatagaccgtgaaagctgggtgcagcgtagcgcccgcctgcctgaacatatcgacaaatggtgattcatagcctccgtcacagacgatcatcggttcatggtcaagatctttcagcgtaatggccgaatgactggcaagcgggtgatcgtccctgagcacgacagccattttgtcttttttcaaatgaatgtactccatctcctctgttggatacagaagaatcccaacatctatcatccgcgtatgaagccactccttgacttcatttacagttccctcgtgcagcacgagctcaagttttggatatttttgtttaaattcactgatcagcttcggcataaaataagccgaggcagttgagaatgtgccgatatggatcgttcccagttcaagccctttttccgctgctgctacctgctcaactttttcaatgccttttaagacttctctaatgtatactaagatctgttttcccgtatccgtcagcatcaggccattgcggcggtcacgaatgatcagctttacatcaagctcagcttcgatcgcagaaatcgcatggctgacagccggctgtgtcatgttcagcgcctgacccgcttttgtaaagcttcccgtttcagctattttcacaaaaacctttaattgtgtaatggtcataacaatttacttatgctccttataaaaaagattcattttatttatcttatgttctaccgtatcatatgatggaaaagttctacaaggagtgaatgaacaatgaagcagctctcaaaaacgcggacagctctcctgctcgcatttctcgtcatcatgtggggcgtcaattggccgctgtccaaagccgcgctcgcctattctccgccattattgttcgcgggcatccgaacgctgatcggcgggcttttattagtcattgtcgcactgccgcgtattcataaattacgcttaaaagaaacgtggccgatttatcttgtttctgctcttttaaatattacgttattctacggcctgcaaacgatcgggctgaattatcttccggccggcctgttttctgcaatcgtcttcttccagcctgttctgatgggtgtattttcttggctgtggctcggcgaatccatgtttgtaatgaaagtgattggcctcatcctcggttttgcgggagtagccgtcattagtgctgcgggctttggcgggcatatttctgtcattggggttctgctggctctcggctccgcaatcagctgggcgctcggaacggtatatatgaaaaaaacaggcagccgcgtcgattccatctggatggtcgctctgcagctgacgatcggaagcgtgtttctgctaatatccggcttttggacagaaagcttttcggcgatccaatggacagctccgttcattacgagcctgctgtttatctccgtattcgttatcgcactcggctggcttgtcttttttacgcttgtcggttcaggagaagcaagcaaggtcgcatcttatacttttttgattccgctcatatcaatcgtggccagctccattttcctgcatgaaccgctcacccttagcctcttggcagggctgctgctgattgtcacgagcatctgtctcgtgaatacaaaatcaaaagcgcagaaagctgcggcgattggtataaacgagaaagctgcacaataataaaaaccctcttgccggatgcggcaagagggtttcttatttactgatgcttgcgtcctttgaccaaatatgcaactgtaatcaaaaggtagatcgccgcagtaatgccggtaatgacaattgatgttgtcatgatgaccccgatcagaatggcgagtaatgccacaatcgcaaaccatgtcgtgtacgggaaccattttacataataggccggtgtttccgtttgctgttttctcgattttaaatgagcgaatccgatgatcagccaaatgaataaaacggtatatcccaatgatcccattaaataattaaatgtttggcttcctgcgaacagagaaatcaatacgccaatatagagagaagaagtgcacatcagaatcgcaaacatcggtacgtttttcgatgaaagcttcgagaagacctttggaagccttccgtcacttgcctgtgtatacaaaatgcgtgatgatccgtataaacctgaattcatagaagaaatgatcgccagcaggatgactgcattcatgatatgatccgcgcccggaatgcctaccattttaaagaccatcacgaaaggactttccggaaccgaattgacttggttccatggaatcaggctgacgatgatgaaaaacggcagcaggtaaaacgcgacaatccgtgtcagtgtgctgcggacagctttcgggacaaccttttccggattttttgtctctgcaagcgttacaccgataatttctgtaccgccgtaagagtagatgacgacaagcatcgccgtgatcagccctgtgccgccgtgcgggaaaaatccgccgtggtctgtcaggttggaaaatccggatgctgtatgatcaccgaatgatacaaataagagcagcaatcccagaataataaagataataataacggtaatcttgatcattgccagccaatattcggtttcggcgaagattttaacagaaagcaagtttacaatcgtgacgataagagaaattcctaatgccaacacccagatcgggcagcccggcagccaatattgaatgaaaattgcagctacaacagcttcagccgcaatgttgagcacccacattttccagtagatccagtccaaaagtaagcggcgtaatttcccaatacctgttggacaagatcacggaaggttctggcgttacggtttcgaacagccatttccgccagcccctgcataataaacagcaaaataatcccgccgagcagatatgcgagaatgacagatggccctgccacatcgatcgctgagctgctccccttaaataaacctgcgccgattgctccgcccagcgccatcatcataatatggcgggacgtcatcgtgcgttttaacgtttgattgtcgtttttcatcctcttctacctctccttctcgttttcaaaaacaaaaaagcccgccgtctcctacctaatctaatagataaagagacgacgagccttcggctgaccgcggtaccactcttgttgattcttcatgaagaatcctgcttttgacctgtaacgaaggttagccgttaaaacatagggaatattcaatctattccgttccgtcttaccactcccgggcgagttcaaagaagaatcaggctgcgtcgcaccaccccgcagctctctgttctgatcactttcttttactgctcccaatctatgtgttttagttttctgaaaaactcaaattttatgatctgaatatattaacataatatacgtgcttctcttttaactgtcaataacttcagagaaaaaagaaactgttattttgtcccttttcgaatggctttccaaaaggattctgactcgtttcctaatgcgtaaactgaaacacctgctattttatattgctttgccagatggcttttcgtttgaacggttttttcgttttcataccacacgacatgtttatgcttctttttgtcaacataagaaaacgtcatcgagcctgattttttgttgaatgccggctttgctttttgttttttgatgagggatttgagctcattccattcccttattgtgctggtacttccgtcttttacatcccagtcatagccgtacgcagggattcccatgatgactttattggctttgatctttttgactgaaaactgcagagagcttttgatccagtttgtgcttgccactgaccccggctcaccccaaatgccgtgttcatcgtaggtcatgacttgtacgaagtcggcatatttgccgattttcgcataatcatacggccagctccagtcatcatttttatcatcggcgcttttggccggaacggataccattgttttaatatgtttcttattcaaagcctgtgagacatattgaatgaagttcgagtatgcagcgcggtcttctggatttactgcttcaaaatcgatattgattccgtaatatgagtgctttttggccagtgtaattaattgatctgtgaatcgttttttcgctgttttattgctcatgacccgactcgctaaatctccgtcaaaatcataaatggcatcattatagtttgaaatgacagcccatgtcttgatttttttctttttcgcatatgtcagctgcttagttggggcatcgccaatgatttgtccgtttttttcaaacgcaaatgtatcggttgcgatggcattcatgtatgtatgatatttcgtaagagaattgtatgaagccgtatccccagtcgtgtagcctactgtcataccggctgccttcgcttctccttttgtatacataaacagaacaatcgcaatcgccagtgaaaccgctatgatcagccattttttcattgcatttcctcctgtatcaagtcatactcttctcatcggccaaaaaattggaagttgaagttttttcaagcaaaaagcccggcatatgcctgccgggcttcctgagttcagcggtcagagacgagaatatatgctgcctttactggtccatgcacccccacaactaaatccatttcaatgtcggctgagttactcggtccggtaatgtagttgatacatgaaggaacagtgacaccgttcgcaatgttttggcggatgatatcactggcttgtgtcattctcggtacaatgcttgatttcggcacgatcgcaatataagtcgttggcaaaaggctgacagagcggccgatgtcttttgaggagaagaggacaaccgtccccgactcagccaatgtaatttcgctgaatgtaatccctacattggcttgctccgcttttttaatattttcctcgcctttgtcagcatcccactcccagaccggcgttccttcactcggccagtccttggtgagcaggcttttcagtccgtattcttcaaagcgggggtccttcggaatgatgacagggcctccagaaaagcggctgacttgctcgcgcagggcatcgtaaaggccggttgaatccgtttcaatcagctctgtatggattttgacgcaatggtttttgagcactgtgactaagtcatccgctgaataaccttcaagtgttttatattgcggctcatacgcccattcagggactgccacgcctcctgttcttctttcacggcccaggctggatgcgattcgatttaaaaagctctcttgattctgaatggttcccttcgtcatcactgctcctccttcgtgcgttcacttgtttctctgtccgcaaaccagtctctgaatctcgatttatgcggtgccgggaagtcacggatctgggtccaatttttaagcgggccgggccctttcgaaattttttcgtcctctgtaaaaggcgtcatggcggccggcgcccattttgagcccattttgtaaagcgataaagaggatgcgccaagtccgaatgctttcattgcaagcttttcactgatcggcgctctgccttctttttcgacgatattctgacgatgcttgagtagcagctcatgaagcgggattttgaccgggcaggcttctgaacaagcagcgcacagtgaagacgcgtacggcagctccttataatcgtcataaccgccgagcaacggcgataaaaccgctccgatcggtcccgagtagattgagccgtatgaatgtccgccgacatggcggtacacaggacagacattgatacaggcggcacagcggatacattgcagcacagactggaattccgttccaaggatattggatcgtccattgtcaacgatgacaagatggaattcttccggaccgtccacttcaccttccagcttcggacccgtcaaagctgtaatataacttgtcagccgctgtccgacagcacttcttgtcagcatgctgacaagcacttcaaattcagaaaatgacgggacaatccgctccattcccatgacggtaatttgtgttgtcggcaaggtgctcacaagccgtccatttccttcattggtcacaaggctgacagaacccgtgtcagcgatggcgaagttacagccggtaatgccgatatccgcttccagaaactttttccggagaatggcgcgcgcatgcatcaccagctcttccggtttttctgtatgttgatagtccagcctttctttaaacacatcgcgtatctgctctttatttttatgaagggcgggcgctacgatatgtgacggcggatcgtgatcatcgatctgcaaaatatactcgccgagatcggtttctacgacttcacagccttccttctccagcacctcattcagattgatttcctctgtgaccattgatttagatttcacaattttcttcccgttcttcttttgaatgacatcacgaatataagaagacgcctcttccgctgtttccgcgaaatagacatgtccgcctcttttcgccacattttcggcaagctgtccgagatagaaatcaaggttttcaaggacatgctgcctgatttcctctgataatgagcgccactcctcccagtttcccagttcttctgctgcctctaggcgccgcgtccgcagacgctcctgtgcacctgaaacagcgcctctcataaattcattatcaatcccctgtgatacccgctctttaaaagcgtcagtaccgattttcatcgccatgatcctttccccctctgaatccagttttatctgctgttgagcacttcggcgatgtgcatcactttgacattcttatcttttcggccaagccgtcccccgatattcatcaaacagccgcagtcagcaccgatcagcacctctgctcccgtttcctccacacattcgactttttcatcgaccatctgctcagaaatctgcgccatcttgacggagaacgttcctccgaatccgcagcagttatgtttgcccggaagctctgtaaactgcaggcccttcacatggctcaacagcttcatcggctcctcccgaacacccagcagcctagtcatatggcacgacgtatgtaaggtcgcttttgtatgaagggtcgcgccgacatcctctactccaaggacgttcacaataaaatctgtcagttcatacgttttatccgccagctttttcgctttatcggcccatttcggatcatcctgaaacaggtgcggatactcccggaacatcgttgtacaggaaccggaaggactgacaacatattcggaatcctgaaacgtttcgatcatccgtttcattgcttttttggcgtcatgtacatagccgctgttgtatgccggctgcccgcagcaaatctgcccttccggaaaatcaacctcgcacccaagccgctccagcagctcaaccgttgcttttccgacatttgtttgaaacatatcaacaagacaagtgacaaaaagtgagactttcatgatgaacccctctctcatccccaatatatgatcaggtcatctgatgacctgagttaaaataactatatgaatatcgtacactattctgacaatggaaggaaagagttttctagggatattttcatttgtggcatatcaaaaacactcccgatctcccaggagtgcagtatatggttaaatccagcccttttcctcagcgatgctggcggcttctgtccgatttttcgcattaagcttttggatgatttctgagatatagtttcgaactgtgccttgagataaatagagctcaagcgtaatgtcttttgttgtcttgcctaaagccgcaagcctcagaatttcttgctctctaacggttagcggattttcgtctcgcatcatattaaacgtcagctcagggctgaagacacgttttccctttacacattttcgaatggcatcggccagatcgtcaatttcgccgtctttcagcagatacccatgtgcaccggcctttacggcgcgttcaaaatatccggggcgggcaaaggtggttaaaataatgaccttgctgacgcagccttttttcattaattcctctgccacatccagcccgcttcgaaccggcatttcaatgtccataatgcatacatccggctccagcttcaaaatagcatgtagcgcctcttccccgttcaatgcttgtccgatgactgtcatatcctcttctaaatcaagcaaggatcccaaagcgcctaaaagcatgcgctggtcctcagcaataaacagacgaatcattcttttcgtcctccaatcattctgcttttttaataagcggaatcgtcagtgccacaaccgttccgttatgatctgaaaccgttaatcccccttcaatgagcatgagccgttcttccattccccacaggccattcccaaacattttctccttcggcgctccctttccgtcatcccgtattacgatcctcattttgtcagcaaattgagaaatggtgatggcacagtgggttgctttgctgtgcttgataatgttagtcacggcttcccgcatacacatactgataatattttgagtgacgggagatatcactgaaaagtcgtcggctccttcgtattgaaaggtaatgttccccgctcttaatatgtgctgaatgtttacgagctcctctgttatcgtgaccgttctcatatcagaaaccagctctcgaacttgcttgagtgcggagcgtgaactggtttccatttcttttgcctcaagcttggtccgttctggatcagatgcagacagccgctgaatgagctggctttttaatgtaagcagcgacagggtgtggccaagagtatcgtgaagatcacgggcgattcgaacacgttcctcccttttagagagttcttttatctgttcgttggcttgtgcaagcttagcttcaagctcaatcctccgaaacatagaacgaattccgaatggagaaatgagcataatgacgagaaacgggagaacagaaaaaagctcccgaagcgagaccgaattcgcgataaattggtataggcatggaaaaagcagtataaagattaaagcgcagaacgcacggttaaaattcgttttctctttgtaataaccaacaaagtttgccggaaaaaaacctaagtatatataggtgatattgtaaaacacactatacatcaaaataaccgccatttgcacgataagccaatatgtaaacgaagctttgcccacgctgcagaataactggcgatatgccgctacaaaaaggagcagcataccatatccgatcccctgtttgacccctgattcttttaataaagagaggaacggcataatcgtatacaccagaaagatataagggaaaaacccgaattccttcgggaaaatagatattgcctttttcatgtattacaccgcttcttgttttcttcttatatatttagatagtagcatgaagagcatcatataagcgattaatatcagaatatttttccaagtcggactcccaccccggacaagttcccacgctccgctcccgaaatgataagacggaagccactggccaatgctctgcatcatgtcaggcatgacctcaaacggcatccacatccctccgcctaaagccagcagcatataaagcacattactgattccggccgctgtttctacttttctcatgaggccgattagtgtgcctaatgctaaaaaaggcaatgcgccaaacaaaatccacagtccgctcatcatccattcaaacggtgacaaggcaatatcattgatgattgcgccgaacagaaatatgacggtaattgataaaacgtgaatgacactttggccgatcatctgagctgataaatagatatgatccggaagaggcgtaaggcggataaaggcggtccagccttgtgaccgctcttgtaccattcggatgccaagcgtcatgatagaggaacccatcacgctgaagactgtcatcgacatcaggtaatgggcttcccatgcacgttgatcagggacgttggtattcactacatttgtaaagaaataataaaaggcaatcggcatgatcagagaccaaagcacaaagtacttgttcctaagcacccttttcatttcagcgatgctttgcttttgcagcacgttcactcacatcgcctccctgttgccgtcagccagctggcgaaatgcctcatcgagcgttgcttgctcaattcgaatatcccgtgcatgtatgttttcttgaaagatcagcgccaacactttgtctgtatttgatgtctggatgatggttctctcatgctcgtggatcactctctcgacttccgggtgacaagacagcctttccaatgattcacttgaatgaagcgtaaaggaaacagactgtttttgaattcttgagcggatttgcattggtgagccgtctgcaacaagctgtccttcagtaaaaaataggattcgctgtgcggcatcatctgcttcctgtaaataatgagttgaaaaaataatcgtttttccttggtccgacagtccgtgaatggtctgccagaatcggtgtcttgatgaagtgtccatgccgactgtcggttcatcaagtataagcagctccgggttcccggcaagagccaaagcaaagctcaaacggcgtttttgtccgccggataatttttctgctcttgttttcaaatcttctttggtgagtgctgttaacgaaacgagttctttcatggacaatggattcggataatagctccggaagagttcaaggatttcatccaccttaaggcccggcatgacacttacttcctgaagcattacacctattttttcacgaacctgttgatcatcgggaacccggttaaatagtttgatttctccctcactcggtttcagcaatcctaatatcatcgagacgacggtcgtcttccctgccccatttggcccgagaatggctgcaatttctcctttttcaatactgaagctgatgtggtttacagcggtttttcgctggaaatgttttgtcacgttgcttactgttactgcttctttcatcacatgagcacctcctgatcgtttacattgattgtaaaatgacggagaagacgatgttagtatggggtgtcatgatgatggagtgacaaatgtcatttttttctcaccccggtgtctaggcaatcctcctcctgcatcttccaattcatccatcttttctatctcccatgtcctctttcttttaaactgctgtgacattcatagaaagatacactcttcaaaccatccgagtgttatgatagaaatattgaactttatattactttccggctgaaaggagccaatcatgaacgaagcgattttgtctagaaatcatgtgaaggtgaaaggcagcggcaaagcatctatcatgttcgcacctggttttggatgcgatcaaagtgtgtggaatgccgtggcacctgcctttgaagaagatcatcgggtgattttgtttgattacgtcggttcgggacattcagatttgcgcgcatatgacctgaatcgttaccagacacttgacggctatgcccaggatgttcttgatgtttgtgaagctttagatctgaaggaaaccgtgtttgtgggtcactccgtcggggccttgattgggatgattgcatccatccgccgcccggagcttttttccaatctggtgatggtggggccttctccttgctatttgaatgatccgcctgagtattacggaggatttgaagaggagcagctccttggcttgctggagatgatggagaaaaattatatcggctgggcaactgtatttgcggcaaccgttctgaatcagccagatcggcctgaaattaaggaagagcttgaaagccgtttttgttctactgatcctgtcattgcccgccaattcgcgaaagcggcgtttttttctgatcaccgagaggatctttcgaaggtaacggttccctctcttattctccaatgtgcagatgatatcatcgcacctgcaacagtaggtaagtatatgcatcagcatctgccttatagcagtctgaaacaaatggaggctcgcggacattgccctcatatgagccatccagatgagacgatacagctgatcggcgattatttaaaagcacacgtgtgatataggaacgaaagggatagaggtgaccctcttagatggacaaacaattgaatgatgcaccatgcggtttcctcgctttgtcagaagaggggtcgatcatagctgccaaccgcacccttatcaagattctggattatgagccggagcaggttatcggccagcatatgaatatgatgttgacaattcccgcacagcttttctgccagctttatttttttccgcttttgaaattggagcatcacatcgaagaaatatacatttccctgaaagctagagatggagaagaaattcccgtccttatcaatgctattgcgagacacgatagcggggcttctgtctttgattgtgttctgattccaatgcgaaagcgaaatgaatatgaaaatgagctgctgatagccagaaatgaggctcaggaagctttgcttgccaaacagaaagccaatgcggagttagagattgccttggaaacgctgaaagcaaaacaagaagaacttcttgagatcaataaacaaaatcaacaatttaaattaaacaccaaaagagagcttgaactcgccagaaagatccagaaaaactcgttgactgaaccgattgtaaacgatcaggttcagattgactcttattacaacgcatcgagtgaattgtcaggtgatctttacggatattatcaaatcgatgaacaccgttacggcattattatccttgatgtgatggggcacggaatttcatctgcattgattacgatgtctcttcatcctttgttccagcgccagatcacgcaaggtctcagccccgttaaagttatgaaggaattggaccggcaccttcacagcttgtttcaaaatgatgaggaagcaagacattattgcactgctatttatctcgagattgacatagcacggcaaagaattgattatgtcaacgcaggacatccgccggcactttggcaggacgatagcggaactcaacatctgcttcacgcgacttcgcctccgatcggaatgtttgaagacttagtatttcagtcaagcagcctttcatacacggagggcggaagattgcttctgtatacggatggcgtgatggatcctacggcttcatgttatttatatgatttactaaaggatcatcctgattcgccgatcgctgaccagaaggagaaaatccttacatcactgcagcatcaaaaggaagctcatcataagagtgatgacgaatgttttatattagttgatgtaaaataaaatgatccatgagacataacaatgatttgttacatctcatggattttttgtttcagcgtttctttggaatatgtcctgactccgcatattgaaacacctgcaaggaaggcagcgggtgtccattaaaatcaaataaagcttgattatctacagcacttcccccataccacttcccggcgtcttcagggtcgtattcagcagcatagctggacgcccaccctgacccgtatgtttcccataacactttgtttttctctatctgtgttttcggtccgaccggaatccacgcaggctcccagtagaaaacaccaagtcctgctttgcccgtattcgccactgcctccattacatctcttactgcagttgcctggccttgaacagaaattggatatggcagcgtctgcccgctttttggtgctgtatttccatgcccatcgccatcctcggcggtataggtgtacgatgtctccgccaccatgacttttttgccgtacgtgttggcaacagccttcagcacggaggtcaaattttgtaatgtgccatgccagaaaggataataggagctcgcaaacacatcataatccactttgtttttgctgagtgtttccgcaataaatgaataccttccagccgtttcaggattggtaaaatgcagggcgaccaaaatatttgaatttgtctccctgaccgctcggcttccttcattaaataattggcacatcttcgtccaatcagtctcaccggcaaatcctcctgttgtttcatttccgacctgaaccatgccgatgtcaacgccttccttgatcatcttttgcaggctttgtttcgtatactcatagagctttgctttttttgcttcaaagctgagattcacccaggctttgggcaccttttgtttcgctggatcggcccagaaatcagagtagtgaaagtcggccagcaccttcattccgttcgctgtcgctctttttccgatttcgatggctttttgaacatcattgtttcccccgccatacccgttgccatttgaatcatacgggttattccagatgcggacgcgaacatagttgaccccagcctgttttaaggttgtaaagatgtcctgacgttttccgcttgtattataaaaggtgacaccgctgttttccaaagcaataacgctggacacatctgcccctttgataaaatccttgttcatcccctctacttttttaacaaaaagatcctctgtccgaagctctgacacgtgcttgtccttctcaatggcagcggcatatcctgttgaactacatgcactccacacgatggcagccgcaaagaacattttcactttgcttttcatgatttcatccccccaagacttagtaagcagtttcattctatagaaaaaagaatccgcccatatcgagcggagcatcagcctaatgtgtgtttacgacaattctcacttcatacttttccatcgtcaggtcgcctgacaatatgtctcctgtcattatgtccttcacactctgatcaaacgtgaccagttgtttttcttccgtaaagttcatcacaaaaatataatcattgtcctgatcctgcctcgcttgtacggagacgccttttccgtgccgaaccggaaaaactggagaaagagacaggtctgtgatcagaccctcatagaaatcacgctgaaattgatcctccaaacgcgcgccgataaaatacgccttgccctgctgatactcatggcttgtgaccgctggcgtgcgcgcataaaaatcttcttgatacactgcttccactgaagctgtctttacatcaatcacggttgcataatccttcatttcatatatttggctgcgatagctgacagcgtttcgatccttcggatacagggtgtccgtttcaagaggctcaactccaaatatagcttgaaggtccggatgccatccgcctgtgtatgttaagtcatgctcattcacaaccccgctgatatacgtcatgactaaggtgccgccgtcagccgtaaacgcttttaaacgggaaatggtgtcctcgctgattaaatacagcatcgggacgatcagcagtttatatggtgaaaagtcttgttctttcgtgatgacgtcgacagggatatcgtgttcccagaatgtgcggtaatgctgctgaagcgtttgcggataacgttttgtcgccttcgcaaacccctgagcatcctcgagcgcccaatgattttcccagtcatataaaatcgcggtttgagccggcctcttcgttccgacaacttcggacagccgttccaatgtctcgcctaccttggccacttcttgaaagacgcggttctttgggctattgtcatgatccacaaccgctccgtgtaatttttctgatgacccccgtgatttgcggtattggaaatagagtacgctgtccgagccgtgggcaatcatttgcatggatgacagcagattcatgcccgggcgcttcgccttgttgacgttatgccaattgaccgcgcttggcgtacactccattaataagaaagactgctgcttcaagcttcggtacaggtcgttgataaaaccgaccttcatcgctaaatcagctgtgctttcccagtcattgtgccagacaggataagcgtcccagctgatgacatcgacatgctttgcaaatttgctgtagtcgaggccctgatacgggatcaaatccggtgtgtcagccataaaattcgttgtgatagggatatcaggcgtcagttctttcagcggaatgatttcatttttataaaacgaaatcgtttgatcggtgacgaaccggcgccaatctaaattcaggccatgcaagccattttcaccgatcggcgaagggctttcaatttgtgaccagtcattgaacgtatggctccaaaaaggagtccaccacgcatggttcaatgccttgaggctgttgtcatatttcgatttcagccactcccggaaagcatgctggcataaatcacagtggcaatctcccccgtattcgtttgaaatgtgccacattaacagcgccgggtgatgtccgtatcgttctgctaataagcggttgatgtgccgtgttttttctcggtagactttagatgtgaggcagtggttgtgccttccgccgtgcagctgtttgacgcgggaggcattgacgcgcaaaacttccggataggtttgcgacagccaggccggacgggctccgctcggcgttgctaatatgacccggccgcctatactgtgaatccgctcaaaaatatcatccagccattcaaattgatatacaccctcctccggctcaagtgcgctccatgcaaaaatgccgacagaaaacgtattcgtatgagaaagcttcatcagtttgatatcgtcagctaaaatatcgggccgatccagccactgatcggggttgtagtctcccccatggagcataaatttcgcttcggttacgtgcgttttttcaagctttgacatcacattctcctcctttttctcttagcccttcgttccgcctgcggttaatccggacacaaaattcttttgcagcatgataaagatgagggcaaccggtatgctgataagcagggctccggccgcaaatgtcgtatagctggcccccatgacatcattcactaaattgaatagaccgacgggcaatgtatatgattcaggcgttctcaatatggttgaggacagcacaaaatctccgagcggaccggtaaagccgttcatggccacgactgccgccatcggttttgataatggcagaatgatctggaagaagattctggtgctgctggctccgtcaatcttggcgctttcgtctaaatccatcggaatggaatccatgtaccctttcatcaaatacgtattcatcgggatcaggccgccgatataaagcaagattagcagccagtggctattgatcattcccaagatttgcgccagcacaaacaaggcaattaaagccgaaaactgaggaatcatctgcagcaataaaaagagcgttaaagcgtatttcctgcctttgaagcgaaagcgcgaaaacgcataggctgtaaacgtcacacagagcaaagaccctgccattgtaaacaggctgatcttcattgagttgacataccactgcacatattgaaggctttctttgcccgcaaataattccttgtaatggtcgaatgtcggatgcttcggaatgatggatgtactgattaagctgttgccagggttaaagcttgcgcctgccgtccaaaggagaggataaacaatgatgaccgccataaaggctagcaacaagtaagagaaaaggagacggatatattttctgactttcatatctgccagcataccttatgccccctctttaaaagactttgtctgtctgaattgccacaatgcgatggagataacaaatacagataataaaatggttaaagccgcagcaagagaatattggctggactgcattgtcaatttataaatccatgaaacgaggatatctgtcccgccggctgttgatccggttacagccggacctccgccattgaatagatagataatattaaagttattaaaattaaacgtaaactgggtaatgataatcggagccattgcaatgaacaccatcggaagcgtgatgtatctcagctttgaaaagacagaagcgccatcaatcgtagctgcttcatacagatcgtccgggatggattgcaatacgcctgttgagacgagaaagatgtacggaaatccgagccagccctgcatgagaatcaacgcaagcctcgaccaattggcatctgtcatccacggaagcggatctatcccgaagaaagccaagatgtcgtgattcatcgcaccgaagctatcattaaacagtcccgcaaaaattaaaatcgtcacaaaaccgggaacggcccatggcaaaatcagaatcgtccgaaaaaaacgtttaaaccgaaggtctttctggttaacaatgatcgcgagaaaaatccccaagctgacttgcagtgtggatgcagcaagtgtccaaaccaccgtccaagccagtacatcaaaaaaagtcgacctccaaatatcaactgtgaaaatatttgcgaacgtttgaaaaccgacccaatcaattaattttgcaggaggagaatgatacaaatcatagtttgtaaacgctaatgcaaagctgaataagataggaaagatcacggcgaaaattaaaataaacaaagaggggccgctgacgacataaggatagccctcagaaatgatatgttggtattgttcctttaaggaacttaatggcttattttcatcacgctgttttccgctttggaacgcatcgcgaagattcacataatacaccgcaaggccaaagcaggtcacgatgacagcgataattccttccgccagcagaaaaacggaattatcccgcggcacttctgttcccagtgtaaagattccccaaaaccccatattgagcagatctccaaagaccgcaaaaaacgatgcgcctaagaaaagaaagacaataccttttatccattgcttgttataaaattgcccgagtcccggaatgatagaaagcaacaaagcgacttgacgatgctgcaccgttttcacctctcttacaatacaaatctagctttctctttattttccgctgtgctttgccttaatttgtcctttggccgtttcagctgcttgatccaatgcttgtttcggatctgccttccctgttgcaaccgtctgtaatgctgaatcagccggcgtccatatttcattcatttccggaatatttggtgttggctctgagaaacgggattgttcagtaacagcccgtgccgcctcgcttttcataatagccgggtcattggctagggatttcacagcaggaacttctttcgtttcttcatatcgtgttttagaatttttttcatttgccaggaaaacggctaattcttgcgccagttcttcattctttgtaaatgcactaacgttgtagcttttgacgccgataaaggagctcatgtttttcctattttccagcttcggcagtttcgtaatgccataattgattcctgctttcgaaaaagcttctacattccatggaccagaaataattgcggcggcttttccttctgtgaacagcgattccaatacgttaatcccttgttctccaataatgccagccgggaacaggccatctttgtaaaacttctgaatcagcgccgcacctttgacagctccttcattattgattccaatgtctgacgggttatagctcccatctttgtcctttccaaaaatgtatccgccatatccgctcatcacactttctgcataataaatttgatcgaatagggctaaaaagccaaaattgctgccatcagctgtctttttggaatagtcgtaccactcttccagcgttttgggcaattccttttctgtgatgagatctttgttgtaaaaaagcacagtcgtttcgaccgcttttggcagtccataaagcttttgatctaccatttgagactgaatggaagcgtcagtataaagtgattgaacgtcttttttgacatgtaattccttgagtaatccttccgtgacagcggttccgatttggtcccctggcattgttaacacgtcagggcctgtgccggccggtccgtccattcgcaaatcttcaatctgcttggcatacggtttttcaacgactttgaccttcacatcatgctctttttcaaacgcagcaacggcgtctttaatgccgatgctcttttctttatcctcccatacaacaagctctgacccttttgaactcgatttggcgctgctgctttcctttgggccgcaagccgccaaggataaactgacagctgcgcagagcatgaatacggaacacttttttgccattttcattgattgtcaccctttcggtaggaatgaaagcgctttaaagataatatagcacgcttgagaaaatgtgtaaacaaactatttacctcatagagtaaatttttttacttaaataaaaatgacttagtgtcctaagtcattcttaattcatactcttcctgacgattaattctgcgcccacatataatgtttttaccgttcttctcttgtcctgcacttgttcaagcagtaattgaacagcgtttttacataattcatgtatatcaatatgaaacgtcgtcagaggaggcgagacatacttcgcgaagctgatgttgttgatactcacaatgcttaccctgtttggtatagcaattcctttttcgttcagggcttgcagacagcccactgctatcgggtccgctgcaatcataaaagcagtcggaagctgatcgcctaatgtgtcgatcgctgctgacatcaggcggtagccgttttctacagagaatccgcgatgacagaaaatatagcgctcgtccagcatggctttttccctcatataggatctgaaggtttgttcacggatgtccatttcatcctgattggtattcggatttttgtatgtgccgccgataaaaccgatgctcttatgccccttctcagccaggatgtttaccgtcttccttgtcatttgtgccaaatcgggccttaccgagtcaaaatgatcgggatcaggagttgaatcgatgaacacgccgttttcagtgagatttctgaggaaagccagctcttcatctgaaaatgtgccgacggcaataaacccttccgtatgttcaggaatgctctcgattccatccgctattttataagtggtcatatcgacattgaatgctttcgccagtttctctacttctaatctcatcgttttaaaatagacatcttctaattcttctttatctgtcagccaatataaaaacgcaatatgtttcaccagcggccttactgtttttttgcggtaattgagcttttccgccgcttcatagattttctcccgtgtttcatcaggaacagaaaggctttcatcgttatttaaaacgcgggaaacggttgagattgaaaatcccgcttcctgcgcgatatctttaattgtcgccattgcatctgcctccattattcagctcgcattgttttagtaaaatattttactttctttttcgcaaatgtcaagtgcacaaagccctctggctgcctcatgtaaaaagactgaaccatttgcggctcagtctcagttgttcgtatcattcggaaccggcggaattgcccgggaaatgagttggttattgcacattttcctcgaaatatcccgaaagcacatcttccacattcgtcaaatgcgccagcatggcggcttccgcctctgcaccgttcccggcagccacagcattgtaaatccgttcgtgctcctcatacagccgctgaacggaggtcttcttggaaaacagccagattttcctcgtttccctcattgtttccagcagcaatgatgacacgtgattcatcaagtgtttaagaagttcattttgagaagcgtccgcaagcgcaagatgaaatgcaaagtctgctttctctcccagctccccgtccgcttcaatgctgcccatttccttcagggcatcatgaattctttcgagatctgcttctgtccttttttcagccgctagtgaagccacgccgatttcaagcagttttctgacctcgagcagctgcttgacgtcctcttttttcatcagaagggcggctgagagcggctgagaaatttgattgagctcaaattccttcagatacgtgccttctccctgtttcatttcgacaagccccatcgcttttagcgcagaaagtgcctcgcgaaccgctgaacggctgacttgaaagctctcagcaagcgcctgaacagagtccagtttatcccccggcttcaattcgccgtttttgatcatatctaatagtgcatccgctacttcttcatatattttttttgttttaatctgtttgtatttcaatgcaattcaccccgtaacttgtaggtctggctgtttacgatctattatactctgttttgtgggccgccaaaagattttgactattttgtcaaaaagtcttgtactttgatttttttcaaaatataatgctaggtaactggtcttattacccagtcatcagatgatcatatcatctatagaaaccgcttacatatggcgccagtttatgtttcaaggaggggtttgggatgcaatggacacaggcatatacgcctatagggggaaatttgctattatcagcgcttgccgcacttgtaccgattattttctttttttgggcactcgcgattaaacggatgaaggggtatacagcaggcttggccacattggggatcgcccttatcattgctgtattggtttatcggatgccggcggaaaaagcgctgatgtccgcgacacaaggagccgtatacggattgttgccgatcggctggatcattgtgacgtctgtttttttgtataaaatcactgtgaaaacgggacagtttgatatcattcgcagctctgttctctcaattactgatgaccgacggcttcaagctctcttgatcgctttttcattcggggcttttttagaaggggcagcaggcttcggagcgccggtcgccatttctgccgcgctgctggtcggtctcggctttaatcctctttatgctgcggggatctgtttgatcgccaatacggcgccggttgcctttggggcaattgggattccaattacagccgtagaagggccgacagggattccggcgatggagatttcgcaaatggtcgggcggcagctgccgtttttatccgtatttattcctctttatttaatcatcatcatgagcgggttcaggaaagccttggagatctggccggcgattctcgtatctggtgtttcctttgccgttgttcaatatctcagttccaattttttagggcctgagctgcccgatgttttgtcagctcttgtttcaatggctgcgcttgctgtgtttttgagatggtggacgccgaaaacaacattccggtttgccggtgaacaagagtcggccgcctcaattgaaacggcgcgcacaaatccggcggcgcctgcgtacagcggcggacagatttttaaggcttggtcgccatttctgctgctgacggcgatgatttccgtatggggcattccatctgtcaaatccgcgctgaccgggcattatgaaggctctgcggtgttcttaaagtggctgaatgctgttggagaaaaactgactttttccccaggtgtgccttttttgaacaatcagattgtcaatgctgacggtacaccgattgaagcggtttacaagttggaggtgcttggttcggccggcaccgcgattttgattgccgcagtgctgtcaaagttcatcacggcgatttcatggaaagactggggaaccgtttttaaagaaacagtccaagaattgaagcttccgattttgaccattgcttctgtcgttggttttgcctatgtcaccaactcctcgggaatgagcacgacactcgggatgacactcgcgctgacaggttcgatgtttaccttctttgcgcccgttctcggctggctcggcgtcttcattaccggctcggatacttccgccaacctgctgttcggcaacctgcagaaagtcaccgcattatcagtcggcatggaccccgttctgtctgtggccgccaactcttcaggcggtgtcacaggaaaaatgatttcaccgcagtcgatagcggtggcgtgcgccgcggtaggactcgccggaaaggagtcagatcttttccgctttaccattaaacacagtctgtttttgctgctgctcgtttgtatcatcacctttttgcagcatcacgtattcagctggatgattccttaaaaaaatcctcccgtctagggaggattttatttatatcgctttctcgctgccgatgacggaatattcatttgatcgcgatattttgccacggtgcgtctcgagatttggatgccgtgttgttcatacagcaaatcgacaagcttttgatctgaaagcggttttgttttgtcctcttgattgatcaggtcttcaagatgcattttgactgcataattcgacgcatctccctctcctgaagcctcggcttttgctgagaaaaagagcttcatctcaaacagcccgtaaggcgtttgtattgttttccctttaatggcccggctcacagttgattcatgaaggcttagacagtccgccacctctctcagagtcagcggcttcattgcgcttcgccctttcagaaagaaatccttttggcgtgtgatcagttcattgataattctcgtgattgtctgttttcgctgcctcagcgcgcggctcagccagcgccactcctgatatttcgcagataaataggagacagtatcctgacaggagccggatgataaaagcgttctgtactgcggatgcagatcgatctcgggaaacgagcgggtattcagttccgctgcgatgtgcccgttttttacagtgataaaaatgtcaggctcaatatacacatcttgctctggccgggcaaacagaaggccaggtctaggatgaagagccgcgatatcatctgagatatcttgaatagtatgaagcggaattcctgcctccactgaaagcgctttccattttttttgcgcaaaagcatcaaaatgagctgaaaccagcatttccgcttgttcatttctgttcggcagccgctgtaattgaagaaggatgcattcctgcaaagatctcgcgccaattccagccggttctaatgactggagttttgccaaaacagcctccgcttccttggccgatacagataatcgccgtgctgcctcctctatatcttcttccaagtacccgtttgaatcaagcgaatgaatcagataattaaaaatctttttttcagtgtttgtcagattcatatcgagtgactgctgttttaacgcatcctgcaatgttttttgcggattacttaattgaaggcccgcttcctgtgcattcatcctgtttttgtttgttttatggtaagatagtggcggtgtgtctgtttcctttcgttcaataagagggttttccagtgagagctcatcaatgtactcggcgagttctgccgaatgatagccaagcagcgtgatggcctgcctgagctcctgtgtcagttgaggctttaatacttgtacttgctgaagtttcatatccatcttgctcactcccctttcttcattgtacatgattgagatcacaccgtatacatttatgaaaaaggagctgccaaagaaatgtctgaacttttttccgtcccttattttattgagaatttaaaacagcatattgaaatgaatcagtctgaggataaaatccacgcgatgaacagctactaccgttccgtcgtctcaacactagtgcaggaccagctgacgaaaaacgcagttgtcctgaaacggattcagcatttagatgaagcatacaacaaagtcaaacgtggagaatcaaaataaaccttccgctcacatgtgagcaggaaggttttccttctttgaggcgtgctggatgagacgggtgcttggcacgccttccatccaggtatgaaagtaattggcgtttttcccgtaggaattatcaatgaccgtgttttctttttgaagaagagaagacaggatgtggccgtgcaacctcgatgtttccaccgattcgtaacggctgaaaaaccgaatcgctttttggacgatataatccgagtatttttcccatatatacgcaatgggcaaagggttgcctgcttttttattcaagacgttcagcgtttggagaaaagcaatcgtccggcggtctgaagctgacagcaccgtgcgccagtcgtagctttccgcttctgcgtgtccctgaagcgcctggtttgcttcatgatctgttcggataaatctcagtttttgattggacggctgctgcgtgggaatgacgggaaacagctgatgaaccatatcaggcagaagctgaatgtgatttcttgaaaaataagcctgtgccgtagcataggaggctttttcccttgtcataatgtgaaggttcgcatgcttagaaaatatctctgccgtccgtttgaggttgtctttgttttgaaaataaatcgattgcggcaggatcacaattttgtggttcggataggtttggacgattttctctctaaagccttgataatacggatacagatccccgaagtttccgcctccctggcagacgatgatgagatgaggatccagctttcgcccgactggaaaattgtcaggattccagcgttttctgacccgaatcccgtgttctttaaagaaggcttctgttcctttcataataaataaatcccctacattcccatatagaggatagtcagcatatataatctctgattgtttcggtatgacgtcgagcagcccggacagtttctgtttcaggctgatcatcgaatgcttgctgtccatttcttcacctcggcagtttggaataagtgcagtagcacttcaatgacccggtcttgctcatcttctgtcatattggaccccgatgggagacagattcctcgcttgaacaaatcttcgcatacgcttcctgtatcttcatgagaataaaataaagccggatcgaatagcggctgggtatggagcggcttccacagcggacgagcttcaatgttttcttcagcaagacgttgaactacgtcatatgggctgagcccgttatcaagtgtgagcgtggtgagccagcgattggatacgcctgctgcgtactccggcataaagcggacgccgtctatgtgaccgagcgcattgttgtatctcgtgaaaatggtccttcttttctccactcgctcatccagcacctcaagctgggcaatgccgacgccggctaagatattgctcagcctgtaattatgaccaatttgactgtgttgataatgaacagccggctctcgtgcctgcgaagcgagaaatcttgctttttcaattgctgcttcatcatttgaaacgagcatccctccccctgatgtggtaatgattttattcccgttaaatgaaaaaatgccgaagcgcccgaaagttccgctttgcttccctttatagactgtgccgagagattcggctgcgtcctcaatgacaggaactccgtatgcatcacacaggcttacgatttcatccattttcgcgctctgcccatacagattgacggcaatcaccgcttttggcagtgttccatttcttttcacttcctccaatgctctttcaagggctgtcggcgacatattccacgtatcaggctcagaatcaataaagacgggcaccgctttttcatatagaatcggattggcggttgctacaaatgtgaaggactggcaaaacacgctgtcaccttcttttacctcaagtaaacgcagcgcgagatgaatcgccgccgttcctgagctgaccgcagctgctgcttttacaccgactcgttctgccagctgttcttcaaatgaattcacgagcggcccaagcggcgcgatccagtttgagcgaaaggcttctgaaatatagtgctgctccctgccgctcatatgagggggagataagtagatttttttatgcatagaatcatcctttgtttgatgtttgaatggaagaaatgatgcgtgccggagcaccggccgccgttaccctgtccggtatgggacggatcaccgcggagccggcgccgacaatgctccaagccccgattgtgatctgcggtatgacggatgcaccggttccgacgtgagccccttcctgaacggaaaccgctcctgacagcgtggcacgcggagacagatggacataatcgctgatctgattgtcgtgctctgccactgcacccgtattgatgatgcaatgagcgccgatgcgcacatccgcctgaatgatcgcgcccgccataatcactgtcccttccccgatgacagccgacttgctgacgatggctgacgggtgaatcaatgtaataaaatcatctttcctcagacccagtcgctccgccagctgttttctgacactgttattcccaacagcaatcagaaacagcacatcaggaatgagcctgcgcagttcagtaacggcttccggcggtcctgtgtaccattcttttccgccttcgaatgttttgaatttatcatccagcaccgcggctaagcgcgtatctgagcgggcgtttatcagctccctgatcacctttccatgaccgccgtcacccacaatggccacgtttttcatgaggacacatctccgcttccggtaaaccgttccgcggtcacatgattggtttgctgaatcccttctgaaacaaggacctttcgcaccgtcaaacataaaattttcaaatcgagaaaaaatgaccggttgtcaacgtaccaaacatctaattcaaatttcttttcccaggaaatcgcgtttctgccattgatttgcgcccagcctgtgatacccggcttcacctcatggcgccgtgcctgtttttctgtataaagaggcagatagtccatcaaaagcggccgcggcccgacaaggctcagatcgcccttcaggacattcaggagctgcggaagctcatcaatgcttagctttctgatcagcctgcccgttttcgtcagccggacttcatcgggcagcagatttccctcactgtcccgttcatccgtcattgtccggaacttgtatagggtgaacggtttgccgtgcaggcctggccttacttgcttaaagaagacaggtgatcctattttcagcctgacaacggcgatggtgaacagaatgatcacactcgtacagcacaacaaaaaaatggcggccgtcagatcaaaaagtcgtttcaggatcaaagattcacagctcctttcgtttttcgaaaccgttttagtaccagctgtctttcctcttttgtacaaacgagcataaaagcgaaaacagcgtagcaaaagctgactgtcactcccgtcgctatcagtgacggccatccgtcaaccttcacaacgaactgaattgccttacagaccgtccaggcaaacacagcggctgatagaggcccgattatgcctttaaagaaaacgtgctttttgtagcctgtaatgcgggatacataaagcggcgtaaagatggcattttttaaaataagagaaatggcccctgccaacgttatgccgtacagaccgagatgagccggcccgctcagcgtgaccgccagcaccacattcaccgcacctaacagcagggtaacaatcgccggtgttttttgttgattaaaagcggtccatatataaaacagcggcataaaggcgaggctgacaaccaagtatccggcatgaataaataaaagcggtgctatcgttgaaaaggacggtccgagccagattgtcaaaaaaggtcccgccaatccgcccaataaggcagcaggaagtgcaagcaaaagaccattgagccttactgccttattggcgtaattcatcaacccttccatatcgccttttgaataatatgaagtcatgataggcgcaaacagggatgcgaccgttccggccaagctgcgcaaaagcagcggaaactggataatcgccgcgtatttcccggatgcggacgcccccagcatcaaattggcggttaacagatcaatctgcaaaaaaagcaggacgccgatttgattgacggagctccatgcgcccgcttgaaacagctccttgcttgtgcggaatgaaagatccttcatacgaaacgaaaaccacggaatcagctttttgaagaaatagaaagacagcacagacgcaatgacagcaccagctaaagctgcaagctggatctgccagattttcggcgcaaagcatgcaaacaggagcagcacagacagcacccgtataagcatttgcaccgcctgaatggaactggtgatataaaggcggttggcataaaatggtgcagcaccgaaacccgccatcagaaacgttaaaataaacagcacactgccgattaaaatcgacaaacgcacatctgccaaaagcgcttgcggcacattcatgacgcggtcaataaaaaaagccgaacccgcaagcggcagcaagagcagcaatgaaatcaaaacagaggccgctaaataattgctgatatacgcatttgctttctcccgctctcccctgtgggcagcaacagaaaagaaccgaacgacaaccgagctgagcgccacggtaataaccgaaaagtaattaatcacattttgtgtcaagtgaacaaagccaaacgcttcgacaccgagcgttttgacaataaaaggcgtcatccaaaccgataggaaaacagacaagagaaaagccgtgagattcgcgctgaaatttatcgtgaatttcatgcctgcttcgcactgcctttcattgtcccccgctgctcgaaaaacagcttgatgagaaaagtgagccgccatttacacagtgctaataccaaacgctctcctcttaataatttctcatgctgaaacggtgtatgtctgacagcctgccgcaccatgtcataggataaaatctgtctgatcttctttttgatgtctttcggcgaattcggagaagcacaggcatttgccaaaagcatcggaagctggtgcctgcaaatgtacacattcaaatcttcttggcatgcgcctgctaagccatagtgattgtagaatgcgattttagcttgatattgtttttgaagatgttcatccatcgccggcttataagggatttctgtcaggctgttcgggttttcacgataaatgtacaatccttcatcaagcattttcacccgctccgcttcgcaaaaagcggacaaattgaagggagagtcttcagcaaaacggatgtcttcagcaaacagcagattcgccctatcaaaaagctcacggcggtaaagataacgccatacataccagataaatctcgtttcgtgagcatgtttaagctgttcagtcatttctcgttttgtcagcacgcggtttgcctcaagctgcggcggcacatatgtccgcctgtccgatgactgtttgtaaaaaccgcatccgacgatgtcgagccgattttcctccgcttcttcagccagcctctggaacatggcggaaaatacataatcgtctccgtctacaaagccgatgtaagtgccccgcgcggcctttattcccgtatttcgcgctgaactaagcccgccgtttgcctgatgaatgacccggattctcgcatcccgttttgcataatcctctgcaattttgcctgaacgatccggtgttccgtcattcacgaggatgatttcaatatcagaaagcgtttgacgaagcaaagaatcaatgcactcccctataaatggttcaacattatacatcgggacaataatgctgacgagcggggtcattgcgcttcaccgctgattttgtcacgcagacctttaaaatacacatctctcggaaagcctgcacgggatgtttcttttgttaaaagctcattgactgcggctgttacgcgctctggctccggatgttctatcagcttcatgaacgggatgtctttaagccattgatagccctccatcaccttatggtcaaaggagcgaatgacaacacacggcgttcctgtcagcgcgcaaaaaatcatgccatgaagcctgtcagtgacgacggcttctgcgctttgcagcttagaccacagtgcttcaagttcttgttcgcgtgtatcgcggctgacccggcggccgatcgttgtcgtaaaggatttgatctcgccgaattcctcacatagcgcagccttgacccggttcctctggtcctcctgaagcacgctttcctgatcctcgcgcaaacacatataaaccccttcgcgttctgcgggggtcttgcttctatctaaatacagcaccatgtccggctgcttcaaaattgttttttcttgaaaatgctgtttcataaattgatacgttgtttcatcccgcgccatcagcaacaggccggggtgcgcattataaattttctgtgcccgtttcagctctttgcgcccttttttcgtgtcagaaaaatgagccgttgccggaagctggacaacccgatagtcatggaatgttttaatgatgaagcggcgcgtccactcctcataacggtataaatcccccatatttccgccgccgatgataaagaccatatcctccggatggcgcgagcggatcaggttttttgctgatttgtaaatgtccttcatatcgacctcgacgatgtcaaagtccgggtattcttgctcaagaaatgccttgctggcataagcaattgcgtgatctcccaaattgtcatgggacggcagcagggtcagtatgatttttttctgatgtgctgcggcctttaccggttgatctgccgctcccagccaatattgggacgggtatttgacctttagcagcagccattctgcaaaattgattttcaacgattgtaacgacatgtcctcaccctctgtttctcattttgtactcgatcacccgctgatacatagccgatgccatagcgacgaacggaatcattctgtatttcgccatcagaagcaggcatgaccgttttgcgtcaaaaggagcggtacccgtttttgaaagactttcttgaaacaccgggtccgcgcatatcacgccaacatttctaagcttttcaaacagtcggcggctgccgctcgttttccattcattcagcatgcagatgctgctgtgaagaacgataaaggtatcaagctccttgcgatactcctccagtttgttgttctcctgtaaaaacgccgcattcgcctcatacagcgcaagtcctgattcaaacaattttttctgatagcgctgcacaatggaggaaaggtgaattcggtaatgatagagcggcgtttttacgtaggatactgagcgggcgaaaaaatgagccctgaagctgaaaaactgatcctcgacatgctccagctcgcctcggagcggaaacgacagccgatgggcttcaatcatgcttcttctgtacagtttgttccatgaaaaccctctgaccttcccttcgaataatgccttgatatagtgctccttcggctgatcctgataggtttgggcaatgtctgagtccatggttttgccagtgtcctcaaactctgcggcgtaattgcaaatgaccagatcagtttcatcgcctgctgcccggagcatctgctcgcaataatcaggttcgatccaatcgtctgaatcgataaacgcgataaattcgccgcgtgccgcttcaatgcctttattccgaaccgcaccgagtccctggttttcctgatgaatcaccttgaacctgttgtccattttggcgtattcttctgcgatatccgggctggcgtcagctgaaccgtcattgacaatgatgatttcaatattgtccactgtctggttccgcagtgattcgagacacgttctgatatatgtttctgtgttataaacagcgactaacagactaaccgcaggtgtttccataatgaccggctcctcgtgcataaattaccgggaaaaaatcgttctgtaaggcagaaccgatgaatcaaccggcataagcaaataactgtaaagaaaataacaaacaacgatagcgatatagataagggcgttcgatttttcatcaaatatcctgacaaaataagggactaagatcatttgatacagaccgaaataaatattgaatctggcaaaaatcacgtcctttgtggccaaaaggccgaacaaaaaaccaagcaggcacaaattgacgacaatatcgatttgcggccacagactccgcaatcgttctttatagcaaaatgcaaggaacagcggcagaaccaaaacagcgattttgatcacattcattccatttgtgttcgtcatgagccatttttcataatggctgtatgagctgttttcaagtacaacgacaaacacagaaataaatttttgatataaaaatgtcatgccgagaaataaagcggataggccgaatatcgccggagaccaggcttttcttctgacaataaagtacaccggaatcataatcagcgccgacgaatgaaagagcgagctgacgagcacaatcaggaaatatcgcttccagttcccgctgatgatataacggatcgcccaaaacaaagcagctgccaccatgtattgcctgatgccgttaaaagacgcgtagtaatgaaaggttcccaaaaacaaaaagacactcagctcaaacggcctgccatagtcggcgagtgtcttcataataaagctgtaggtcacgaccgccaccgtaaaatacatgatttgaggatcttccgtgatgaaattcatcagccaaaggagtgcggtaaaccccggatctgtcgctgttttcgctgtgccgaaaccgaatatctgccacacattttgataatcgcccgccaattcgtacagcagcgtgtacgtctgaaaatccgtgccgactcgatagcggagacctgacacgagcacaagtgaagcgagcggaatccagatcaaaagcttattcggccgataccccgtggcaagcgaatcgtcacggccgccgcacattttagcgaaccaagaccaaataaatacaatccccatattgacggcatatacaatcatcggttatggtccttttccgtgctgatgttgtatacattcagcagcgctcctacattttgctgtgcatcgtagccaagttgagcgagtgtttctttgatgaactcacgcttcggcctgcctgcggcggccgcccttgcaatggtttcagcccagacgctgatcggttcagaaagacttaatcttgtgacaagcccgagaccggcgtcgactttttctgtaatgctgcctgaaatgatgcatggaagccccgacgcctgcgcttccacaagcacaaccggcaagccttcgtacagagacggcatgacaaacacatcaaatgtgcgcatcaattcatggatccgttcttcagtgcctaaaaagagaacatctgatagcagattctgccggcgcgcctcctcctctatctccccgcgcaacggcccgtctcccgccagaacgagctgaaagcgaacgcctctttccttgagatgtgcggcaagcttcagcaggaacgcgtggtttttcacttcatgaaaccgggccacatggccgatgatgagccggtcggctgcaatgccgcgtgctgctttttcttcatcagccgcctgcccatttggggcgaacaactcaaggtcaatcccgttaggaagaaggtgaacacgctcccgctccatattggactgtccaaataaaaacctgcccgcatcctctccgcaggcacacagcgctgtcgcatttgccaaaatgagccgcctgaacacgagcagctgcaagcgatccttccagttgaagccggtcttccaagacgtattgtgggaatggcataccctgaccggcactccggcgagccttgccgcaagggcgataaaacccgtttggaaatccgtgtgcgcatgaacggcgctgaacggcccgttttcttttatcgcttttctcacattcctcacaaatgtaaggggattgctttgcccaatgctcgggacataaaaaagacgcccgcctaaagataaaatctcttcatcataagcgcacggatcatttcgatacgttaaaaaatcaaattgcactttgcttttgtccatcttccgatataaattcattaccatggtttccgcgccgcccctgttcatgccactgagaacatggagtacgcgcttttggctgctattcatgcttgacaagcccttccttttggttcatcactctttttttatggtagcgattcatcacggctgcaggcataaacgcgcggattaacggttttgcgatatatatgtaatcagataaaggaagcttcaagcgtctgcacgcctgatagacaaggatggcattgtcaattgaatacgtaaatgaccgccgtttgaatgcatcgctgtcttccctcactttatacaaggcttcctgaagattatagcccctgaagccctcttcaaaaaagcgaagccacaaatcaatatcttccattcgtctcgtccgccgcaccgaccggtagcctttcagcgtgcggtaggcactcgctctcatcataatcgtgccatggcaaaatggggtcccttttgccatgatgcccggctccggaacagaaggcagaatgcgggcgcctcttacgccaaattcatcaaacacaagcatgccggtgccaaccacctgataatgtcggtgcttttctaaaaacgcgacctgcttttccagacggcgcggaaacgaaaggtcatctccatcctgacgtgcgatataatcgcctgtcgcatgcgaaagacaatgatttaatgatgcggcaagccgcttatttgttttgttttgaatcagtttgatgcggtcgctgtaatgagcggcatactgcttcgcgatgcggagcgtgccgtctgttgacgcatcatcgcacaaaatcagctcccaatttttataggattggctgagtatggattctatgctttctgccaaagtgcgttcgcaattataaatgcccataatgacagaaactttcggtcctgagttcatacgcttttctcctttgtatccatatccatgtacgcggaataaatatctgccatttcttccaccgttcgcgcctccgagaagcgcaaggctgtttttcggccttcctgtcccagctttcggcagagctccggcttatggtaaagctgttcaatccggcgggcaaaagcagcactgtcaccgattttgaccagaaaaccgttttctccgtcgcgaatgatttcccgatgcccgcgattatctgtggcgatcgccggtttttctgccgccattccctcaagcacattcataccgaggccttctctaatgctggatgcgacagatacatccgcaagctgaatcaactcatgtatgtcgctgcaaaagccgtaaaaacagacattggcggaggcaccaagcttttcagctaacgtttgatacgtatgttccattgccccttccccggcaaacacaaggcggagtgagggaattttttcttttagcaaggctgcggcttcaattaactgcttctggtttttgttcagattgagctcagccggataaaccaatataaaatcatcttcacggaacccgtgcttttctctgagtctttgctgctctatcggactgacaggccggaaacgctcggtgttgacgccaatgccgtgaattttctgcgtccttccgcccggcctttgaagtcctttcgcccgtatgtaatcctcttcattaatcgtaatcaggcagtctgtatatgctgaaagccatttctcaaccggatagtaaagaagccaatttttcatcggtgcccctttgcagaagtgaaatccgtgtgctgtgtacagcacctttgttccgtgccgccgtgcctgcctcgccgccagtctggcgagaacgccgccgaccggtgtatggcaatggacaatgtcgtattcataggtgtcaatcactttcttcagctgcctataaacggccaggttctgagggtcaaaaggtgacctgcgaatcgggatggagaatttctcatccacatacggcagcttggtttgtccgttcgcagcgacatgaacctcccagcccatttgtttgaaccatttaaaataagggaggtgaaaggccttaaaatgataatcaacagtcgcgcaaaacaatatctttttcgtcattttcactccccctaatgaacgctggcagccgtcatttcttctgatgtattgattgccgcaaacagcctcgctctcaggtcggcttccggcagctcatgaaaatcctcgataaagcgcatcagcaccggccaatcgccgtccaccgctttaccgatgtgaatttttggaaagatttgttcagcatggacttcatttttgttcagcaattcttcatacattttttcgcccggacgaatgcctgtgaattcgattggaacctgctcagtcgtgtagccggacaaatgaatgaggtttttggcaagatccacaatctttacgggctctcccatatcgagaacgaaaatctgacgccctttcgccagtgccccagcctgaatcacaagccttgatgcctcgggaatcgtcatgaaatagcgggtcattgccggatgtgttactgtcaccggaccgcctttttcaatctgttttttgaaaattggaatgacgctgccgcggctcccgagtacattgccgaagcgaacagcgacaaatttggttctgctgactttcccaagattcataataatcatctctgcgaatcgttttgtcgcccccattacgttggctgggttcaccgctttgtccgatgaaatcagcacgaatgtctctgttcccgacatatcggctgcttccgcgacattttttgttccgataatattgtttttgaccgcctcttctggattgtgttccattaaaggcacatgcttatgggcagctgcatgatagacaacatgcggctcgtattttttcatcaaggtaaacattttatcgcggtcctgcacatcagcgatttccgtatggaacacaatgtgtttgccgaatcgtccgttcagctctgtataaatcgaatgaatgctgttttccccatggccgagcagaatgatttccttaggctgaaacgcgctgatctgacgacagatttccgagccgattgatccgcccgctcccgtgacgagaactgtttttcctttgatgcggttcgaaatttcgctagtgtcgagggttaccggctttctgccgagcaagtcctcagcttttacatctctgatttgtccggcagttcgtgtgccaagcagcatttcatcaaaatgaggcataattttaatgtttactccggttcgcacacattctttatataacacctgaagctcatgggtgcggagtgaaggaatggcaataataatataattaattttgagcttttgcaccgcaggcatgatactttcttttccgccgattacgggcagccccataatttctaatttatgcttcgtttggtcgtcatcaataaaagcgacaggtatgatatcaggttcatctttcgaaagcagctgcctgaccatcagagtcccacctgagcccgccccgataatcagcgcgcgggacgaggcgcagcgttttttcctgatgctttcgtttaatactctggataaaatacgggtccctccaatagacaaaagctgaagcacccagcacgcggttaacagacggaagaacatcgtgtgatacacagcatactgaatgacgccggtcacagcggctgaaagcgtaatgcccttaagcaggacaatcagctcgccaagcccggtgtatgtccacacctgtttatactgattgaacaggaaagcacacacatgatagctgagaagcaagctgacagcagtaagcagtaatgctccggagtcataaaattgataggaatcttttaaaaattgatatcctgcaataactgaatttaaaacgaggtaagtatccagcgcaataatcattgacagtcttctccggtaactcaaccttttcccccctaattcttttatcggtttagctgcggcggttttcgtctctccaaaaaatcggcagcagctaaaccgacaacacgtcctatgtatatatcagataagtgggcatttaacccatcctcacgccccgccagcgacgaccagcatctaaggcagcaacttcagctgcccacagcagagccgagtgcctccattgatacaggtcaggagacatcacctttacaaaaactagtaggaatagtgttccgattttttcattttctttttgtttaaaagagcgcctaacagcttcgcattggattgttccagtgcatcctttgctttcagaacggtatcggtttttgtttttccgcttaaaacgacgagcacgctgccgtctgtctgatttgctagaatctgagcatctgcaacagccaaaagaggaggggaatcaaagatgacgaggctgaattgttcatagatctcagatattaaatctcccattgcttttgaagacaacagttctgccgggtttggcggggtcggcccgcttgtcagtacatataagttatcgatcggcgtcttttgcaccgtctcactgagtgaagcattgccgaccagcacatttgtcagcccggttacattatcaacctgaaacgtctgattgatggtcggctttcttaaatcggcatccaccagcagtactttcttttcctgctgctgcgcaaagacagccgcaagattcgctgcactgaacgatttaccttcaccaggcacagaggaggtgacgaggatagatcgcaagttggtctggacagatgagaactcaatgtttgtccgaatggtgcgatattgttccgcaacaactgatttattgtgtaaaacagatatttgagccaaacctcgccttgctttcttttttctaaagatcactcgcttcactccccgaaatgttttatcccacgattccgccctttgtggacatcaggaacggagcctaagcatggcaatccggttctctcgctgagctgccgtgcgcttttgcaagtatcatcgagaaaatgcagaaaaaatgccagtgtaatgccgcccatgacagcagcgccaaaagccatgaccatatttcgcagcctggccggcttgatcatcgggctttcagaagccttcgcctctgataatatatgtacgccttgtacattcattctttcatctacttctttttcaaacttgttcactaacgtgttcgcaatctcagccgctttcgccgggtcgtgatcctggacggcaacgttgataatttctgattcattttcactgctggtaaccacttttcctttcagcgaggaagccgattcagataggtgcaattccgccttaacttcttccatcaaggcagtgcttttcataatcgattggaacgtgctgctatactgaagatttcgctggatgtcactgagattcgagttttcttcaccgtctgattcatgaaccagcacctgtgtcgacgcctggtaggtcggtgaaatgaccttaaattgcacaaaacccataataagggtgacgccgattgtgatgagcagaatcagcacgaatctgtgtctgacaatcgcatataattctttgaaactcatattctcattcatgtattcatagccttcagccttcccgcggctggcttcccgcgcccctttctgttaatgattggattataaaagaaaacgttattatttaaaaattgcaaaataagccaataagttctctttagagaacaaaatcatgattttcctctaatttactgcacttcccttattattttaaattttataaagaacgaaaaattctttataatgaacaaaataacgacaggaatagaggagaatttcatattatgattggaagaattatccgtttgtaccgtaaaagaaaaggctattctattaatcagctggctgttgagtcaggcgtatccaaatcctatttaagcaagattgaaagaggcgttcacacgaatccgtccgttcaatttttaaaaaaagtttctgccacactggaagttgaattaacagaattatttgacgcagaaacaatgatgtatgaaaaaatcagcggcggtgaagaagaatggcgcgtacatttagtgcaagccgtacaagccgggatggaaaaggaagaattgttcacttttacgaacaggctaaagaaagaacagcctgaaactgcctcttaccgcaaccgcaaactgacggaatccaatatagaagaatggaaagcgctgatggcggaagcaagagaaatcggtctgactgtccatgaagtcaaatcctttttaaaaacaatgggaagatgatgatcggttaagggctaacgttcgcatctatagggtaaatctgtttataatgggggaaaaagggagagaacacaatgactcatcaaatagtaacgactcaatacggcaaagtaaaaggcacaacggaaaacggcgtacataagtggaaaggcatcccctatgccaagccgcctgtcggacaatggcgttttaaagcacctgagccgcctgaagtgtgggaagatgtccttgatgccacagcgtacggccctgtttgcccgcagccgtctgatttgctgtcactttcgtatactgagctgccccgccagtccgaggattgcttgtttgtcaatgtatttgcgcctgacactccaagccaaaacctgcctgtcatggtttggattcacggaggcgctttttatctcggcgcgggcagtgagccattgtatgacggatcaaaacttgcggcgcagggagaggtcattgtcgttacactgaactatcggctggggccgtttggctttttgcacttgtcttcgtttgatgaggcgtattccgataaccttgggcttttagaccaagtcgccgcactgaaatgggtgcgggagaatatttcagcgtttggcggtgatcccgataacgtaacagtatttggagaatccgccggcgggatgagcattgccgcgcttctcgctatgcctgcggcaaaaggcctgttccagaaagcaatcatggaaagcggcgcttctcgaacgatgacgaaagaacaagcggcgagcacctcggcagcctttttacaggtccttgggattaacgagggccaattggataaattgcatacggtttctgcggaagatttgctaaaagcggccgatcagcttcggatcgcagaaaaagaaaatatctttcagctgttcttccagcccgcccttgatccaaaaacgctgcctgctgaaccagaaaaagcgatcgcagaaggggccgcttccggcattccgctattaatcggaacaacccgtgatgaaggatatttatttttcaccccggattcagacgttcattctcaggaaacgcttgatgcagcgctcgagtatttactagggaagccgctggcagagaaagctgccgatttgtatccgcgttctctggaaagccaaattcatatgatgactgatttgttattttggcgccccgctgtcgcctatgcatccgcacattcccattatgcccctgtctggatgtaccggttcgattggcacccggagaagccgccgtacaataaagcgtttcacgcattagagcttccttttgtctttggaaatctggacggattagaacgaatggcaaaagcggaggttacggatgaggtgaaacagctttctcactcgatacaatcagcatggatcacattcgccaaaacaggaaacccaagcaccgaagctgtgaattggccggcgtatcatgaagaaacgagagagacgctgattttagactcagagattacgatcgaaaacgatcccgaatctgaaaaaaggcagaagctattcccttcaaaaggagaataaatatggggaaaacaggatacattggtgctgccattgttgtggcagcttgtatcattattttgtcggccgtggtatgtttacgggacacagtctattaccagcctatgcgctggactggcatcatactgtttttcgtgggaattgtgatggttcccgcatactcagcaaaaagaaaacccggaaaagagaagtaattctcttttccgggtttttatgtttattataatcttcccgcgcgaatatcgtctgtcattccctcataaggagccttcgaaatcacttcttcgttgtcgactccttcatttttcagaaatgtaatttccgcaaattcaggtacaacgtattttggatacgtttcatatttttcgcgggattcttccatcaaatcaatgtggtcattttggtagcaaaccgtaatttcaggatgttcatgcacccatttcgggaagaaaataatgccgtgcatgcgtttttcatttggcataaagtttaatgaaacatccgtgccagtcggctctgtccaagacactttatatacgccttctgtcagtttgacaatattcacttcctgatcccgaacccagcgtccggcaaccattccgctatgaattctataatcaattgtatggtcatttttaatataaatctcgtattcccagccgttttcatacgtataaatcatgtggcttccgataaagttttccatttttcacactctccttagtcttttactgcacttcataaatgtctagtcgaacgtaatcaggggttctttctgcggaaccgataaacaagcggtcatggagccattgatagactttactgcctgtttcaaacgtcggtaccgtacgaaaataaacatgctccggatcaatgatttccccggctgccgcttgttttcgaaacggctcgctgacttgccgtattccattgttttcaatgtaaatcagttcatgatctgctgtttcgatcacatacctggcagataaatcgtttctgccgtcagcgcgaatcatttgcgaatcggcaccgctcggcaaaatacgtccctttacttccccggttattgttcccgaacgaatcggaatgaatcgtctcagtcccaggcctgtctcaccaatcgtgataggcggatcaaccttgatttctaaagaggcgaatggttttaaaaccggcttcttcacgagaaccacctcacctccagaaaaaatcatgtaactatttacatgtttaatttaacactattgcagttaactgtcaaacaataggaacataaaaaaacaaggactgtttgaagacagtccttgtctgaagctagctttgataagcaagatatgtgctgacagtgcttttggcaagacaggcagaggaatctataatcggaatctcactttgaatatgatctaacaccgcatttaaatccgtgcaggctgaaatgatgatgtctgcatgctgactgatttcttcatatagcgtctgccacaatgcttgtgtatgctgcatatgatttggctgtttgattgcggcgataagctggttcacagcctgctgccaatggtccttgtgaacaacttcttgtccatttgccttcagaactttttggtagatggcggattggatggttggctctgttcctaaaaccaccgctttttttgcaggatgcggaatctcttttatcgtttcctcaacgatatgcaacataggaaccgacaatgcctgctgaatctcttcatagtagacatgcgccgtattacaaggcagcgcaatgaaatccactcctgttttctcgagctttaccgctccgtcgataatcgcttttttcatctcgtcatggtcaattggacgatctgcatagaagggcgtcgggcatgaatagatcatcatgtgcgggtagtcaatatcgtttgaagccccatacagcttctgacagtaatcaatcaccttatcaataaacggcgaggtcgatttcggccccattccggctaatattccgatcatcaaattcattcctttctaatttgtacggaccgcttcttcttctgagccatcctcatagaggataaagcttttcgcagcatccccgcctaacataaactcgacttcaacagacaatgctcgcagaaagaaacgggtttccgaggaaggaaataactccagtctcagctgtccggtgatctccaaataaagccgttcattctcggctgtcacctgtgcagccgttccatcctgcaacaggtagctgccaacatagcggctgtatatcgccgtatcaattgcttttttctttttatcagcaggacgttccgggacctcatatggctggccaaatagaatatgttccgccgccttcagaatcgcttgttcatattcagtatcctcttccttattactcaaatagatcagtgttttacgatgatcgatatatcggatcatcaacgtcgaatagccgggccatcctccgctgtggctgacaatccgccctttttcaggactattttgcagtacccagccaaagccataatcaattgtttctccattgttgaggcgcactggagaaaacgcagattccttagaagccttgctgatgaaatcgtcctgatataaagcctgatcaaatcgaaacaaatcgcttgtgacagagttcaccgtcccatctccctgtatgccatcgagatacacaacatagttcgtttcctccagctcatcagggaggacgtatgtttcggaatgtacatcatacacatatccatatgcataatgatcaattcgctcaggcgaaagcctcctgttatacactcttgtttcattcatgccgatcggtgaaaaaatacttgttttcataaaatccgcatagctcatgccagatgctttttcaatgataaccgccagcagcacataccccgtattgctgtacatccagccttcattcggttcaaaataaccagatagcccctcattcatcagcatatcgacaatatcctgattcaccgcaatcttgtgtgaatcccaattggcaaaaaaccatcccatataatcaggaagccctgacgtatggttcaataaatgccgaatcgttacgccctgatacggaaaaccgggcagccagcgatccactttatcctcatagccaagaatccccttctcctccagcaagatgattcccaatgctgtaaaaggctttgacaaagacgctaactcaaacaaagagttggttttcaacgggcgtttttccgtcatttccgcatagccaaaagagtggtgatataaaatatcgccaccctccgcagccagaaccgtcccgttaaactgatgtttttcgcctaatgtctcaaataatgtctgaagatgctttcttttattctgtttcattcctccacctcccatatctctgtacgttactaacctactaacgtttcaaatattttgaaaaacccttcagttagagatcctttttaacccatcacatatacctgcggttcactactatttagtgaaatgagatattatgatattttctgaattatgattaaaaaggcaactttatgcccatgcaacagaagctataaaaaatacagagaatgaaaagaaacagatagattttttagttctttaggcccgtagaccgcaaatccttttatgattttctatcaaacaaaagaggaaaatagaccagttgcaatccaaacgagagtctaatagaatgaggtcgaaaagtaaatcgcgcgggtttgttactgataaagcaggcaagacctaaaatgtgtaaagggcaaagtgtatactttggcgtcaccccttacatattttaggtctttttttattgtgcgtaactaacttgccatcttcaaacaggagggctggaagaagcagaccgctaacacagtacataaaaaaggagacatgaacgatgaacatcaaaaagtttgcaaaacaagcaacagtattaacctttactaccgcactgctggcaggaggcgcaactcaagcgtttgcgaaagaaacgaaccaaaagccatataaggaaacatacggcatttcccatattacacgccatgatatgctgcaaatccctgaacagcaaaaaaatgaaaaatatcaagttcctgaattcgattcgtccacaattaaaaatatctcttctgcaaaaggcctggacgtttgggacagctggccattacaaaacgctgacggcactgtcgcaaactatcatggctaccacatcgtctttgcattagccggagatcctaaaaatgcggatgacacatcgatttacatgttctatcaaaaagtcggcgaaacttctattgacagctggaaaaacgctggccgcgtctttaaagacagcgacaaattcgatgcaaatgattctatcctaaaagaccaaacgcaagaatggtcaggttcagccacatttacatctgacggaaaaatccgtttattctacactgatttctccggtaaacattacggcaaacaaacactgacaactgcacaggttaacgtatcagcatcagacagctctctgaacatcaacggtgtagaggattataaatcaatctttgacggtgacggcaaaacgtatcaaaatgtacagcagttcatcgatgaaggcaactacagctcaggcgacaaccatacgctgagagatcctcactacgtagaagataaaggccacaaatacttagtatttgaagcaaacactggaactgaagatggctaccaaggcgaagaatctttatttaacaaagcatactatggcaaaagcacatcattcttccgtcaagaaagtcaaaagcttctgcaaagtgataaaaagcgcactgctgaattagctaacggcgctctcggtatgattgagctaaacgatgattacacactgaaaaaagtgatgaaaccgctgattgcatctaacacagtaacagatgaaattgaacgcgcgaacgtctttaaaatgaacggcaaatggtatctgttcactgactcccgcgggtcaaaaatgacgattgacggcattacgtctaacgatatttacatgcttggctatgtttctaattctttaactggcccatacaagccgctgaacaaaactggccttgtgttaaaaatggatcttgatcctaacgatgtaacctttacttactcacacttcgctgtacctcaagcgaaaggaaacaatgtcgtgattacaagctatatgacaaacagaggattctacgcagacaaacaatcaacgtttgcgccaagcttcctgctgaacatcaaaggcaagaaaacatctgttgtcaaagacagcatccttgaacaaggacaattaacagttaacaaataaaaacgcaaaagaaaatgccgatatcctattggcattttcttttatttcttatcaacataaaggtgaatcccatatgaactatataaaagcaggcaaatggctaaccgtattcctaacctttttaggaatattgctgtttatcgacttatttccaaaagaagaacatgaccaaaaaacaaaatcaaaacagaagccggactaccgggctgcatatcattttacgacgccggataaatggaaaaatgaccctcaaaaaccgatctattttgatggcaagtatcattatttctatctatataaccgggattacccaaaaggcaacggcacagaatggcgccatgccgtctcagaggatttggtgcactggaccgatgaaggcgtggcgattccgaaatatacaaacccggacggtgacatttggaccggttccgtcgtggttgataaagagaacacagccggctttgggaaaaatgcgcttgtcgcgattgtgacacagccctcagccaaagacaaaaaacaggaacaatatttgtggtacagcacagataagggaaaatcattcaaattctacagtggcaaccccgttatgcctaatccgggtacagacgatttcagagatccgaaagtcatatgggatgaccaggataacaaatgggtcatggtcatggctgaaggatcaaaaatcggcttttatgaatccgataatcttaaggactggcattacacaagcggattcttcccagaacaggcgggaatggtggaatgtcccgacctctacatgatgcgggcaagcgacggaacgaataagtgggttctcggtgccagcgcgaatggcaaaccgtggggcaaaccaaatacgtacgcctactggaccggaagcttcgacggaaaagaattcaaagcggatcagactgaagcccaatggcttgactatggcttcgactggtatggcggtgtgacgttcgaagacagcaaaagcacagatccattagaaaagcggtatgcgcttgcctggatgaacaattgggattatgccaacaacaccccgacaatgaagaacggctttaacggcacagattctgtcatacgcgaactccggctgaaggagcaggatggaacatacagcctcgtctcacagccgattgaagctttggagcagctgactgtttcaactgacgaaatagaggatcaggatgtgaacggatcaaaaacattgtcgataacaggtgatacgtaccagcttgatacggatctttcttggtcagagctaaagaatgcaggcgtcaggctcagagaatcagaagaccaaaaacgccatattgatgtcggtattttcgctgaaggcggctatgcttatgtcaatagagcagccacaaatcagcctgacaaaagcaatacctatgtcgaaagcaaagctccttatgatgtaaacaaacgtaaggtgcatttgaaaatacttgtcgataaaacaacgatagaagtatttgttggcgacgggaaaaccgttttttcaaatgaagtcttcccaaagcctgaagataaaggaattaccctttattctgacggcggcacagcctccttcaaaaatataacagtgaaacactttgattcgattcatgaataaaaacaggggcagcgcaggctgccctgtttttttattaggagcggtattctctgttacatattgggcattgtaagaaatataaggctggtttcaaaggaggaagcgaatgtctaaacaaggaaattttcaaaaatcaatgtcgctgtttgatctgattttgattgggatgggagccatctttggatcagcgtggctgttcgctgtcagtaatgtcgcttcaaaagcagggccctccggcgctttttcctggatcctcggaggagccattattttgttaatcgggctcgtatatgcggagctcggagccgctctgccccgtaccggaggcatcattcgataccccgtttattcacatggccaccttgtcggctacttaatttcgtttgtcacgattgtcgcttatacaagcttgatttcaattgaagtgacagctgtgcgccagtatgtggcctattggtttcccggcctgaccattaaagggtctgattcgccgaccatttccggctggatcttgcagtttgccctattatgcttgtttttcctgctgaattattggagcgtcaaaaccttcgctaaggcgaatttcatcatatcgatttttaaatatattgtgccgattaccatcattattgtgctgatctttcattttcagccggagaatttatccgttcaaggatttgcaccgtttggatttacaggtattcaggctgcaatctcgacaggcggcgtcatgtttgcgtatctcggcctgcacccgattgtatctgtagcaggtgaagtccaaaatccaaaacgcaatatcccgatcgctttaatcatttgcatcatcgtttcaaccatcatttatactgttttgcaggtcacctttattggtgcaatcccgacagaaacactgaaacatggctggcccgcaattggccgggagttctcattgccgtttaaggatattgcggtcatgctcggattaggctggcttgcaacgcttgtcattttagacgccattctgtctcccggaggaaacgggaatatctttatgaatacgacatcccgccttgtttacgcctgggcgcgtaacggcacattatttggcatattctcaaaggtcaataaagatacggggacaccccgcgcatcgctttggctttcgtttgccctgtccattttctggacacttccctttccttcgtggaatgcgctcgtcaatgtctgttcagtcgcgctcattctttcatatgcgattgcacccatttcttcagctgcgctgagggtcaacgcgaaggacttaaacaggccgttttatttaaagggaatgagcattatcgggccgctttcctttatatttacagcgtttatcgtgtactggtcaggatggaaaacagtctcctggctgctcggttcacaactcgtgatgtttttgatctatctctgtttcagcaaatatacgcctaaagaagatgtcagcctcgctcagcagctgaaatcagcctggtggcttatcgggttttatattatgatgctgatcttttcctacatcggttctttcggacatggtttagggattatcagcaatcccgtcgacctcattttagtcgcgatcggctcacttgcgatttattactgggcaaagtataccgggctcccaaaagccgccattgattacgataaataaagaagcaagaggttttcttgcttctttattctttacaaacatacatacacgcgataaaatgaatgagagtcagtcattatcggaggtgttcctcatgccaaaacaaacatcgggcaaatacgaaaaaattctgcaggctgccatagaagtcatttctgaaaaaggcctcgacaaagcttctatttctgatattgtcaaaaaggccggcactgcccaaggaacattctatttgtatttttcatctaaaaatgccctcataccggccattgcagaaaatctcctcacccatacacttgatcaaatcaaaggtaggctgcatggggacgaggatttttggaccgttttagatatattaattgatgagacatttctcattacagaacgccataaggatattattgtcctctgttattccgggcttgcgatcgaccactccatggaaaaatgggagacgatctatcagccttattattcctggcttgaaaaaatcatcaacaaggccattgcaaaccacgaggtaacggaaggaatcaattcaaaatggacggccagaacgattatcaacttggtcgagaatactgcggaacgattctatatcggatttgaacaagatgaaaatgttgaagtgtataaaaaggaaattttcactttcttaaaacggagcttaggtactgcttaaaaaatgactgggtaacaccgctcattttttaatgccctaaaaatgactgacgttcattcataaaatagagaggtgtttcatttgaattgggttcttgtttttattgcagggcttttagaagttgtttgggcctcttccctcaaacatgccgattcgcttttggattggatcatcatttttatcttaatcgcggtcagctttatcctgttgatccgctcttatcaaaaaatcccgatggccgcggcgtacactgtgtttgtgggaatcggaaccgtcggaacatatctgactggaattgttctgggcgaatccttctcagcagcccaaatgttctttttagctttattgctggctggcattttaggaatgaaattatttacgaaagaaagcaaatctcagccgggaggtgaacaataatggcatggtttttattagtgattgccggcatagaagaaattatagctgccattgccatgaaatatatagacggaacaagaaaaaaatggccaatcattgtgatgactgttggattcggcttatccttttactgcctttcccaagcgatgatcgtcctgcctgccggagtcgcatatgccgtctggactggcattggaagcattggtgtttcggcggtcgggctcatctggtttaaggagcggtttcagctttcacaggtgatttcactttgccttatcctagccggcgtcatcggcctgcgtcttacgtcatcttcataaaatcaaggcatatacagctgtatatgcctttgccattaagcttcgtgatgtttttgaagatgaagcggcggtgggatgagccagcctttgttttttagcagccttaagtattttgcgccggttgccgctttcgacatatgaaattgcccaaacatcatggcaatatcctcacgaatcgattgccccatcattttgctgcatgtcaccagacctgcagcattttctgctgccgcggaggccgccacatccggatcgagaaaccgtgcgccaggcggaatgtcgttaagatctgctgtcggcggttcaggagaagccggcggcagcgccaccccgttttctttcaggatcgtgctgacctgtttgatttcatcttggcatttctcaatagactcacgaagcagtttcttcaggtcgtcatcaccgacatgattcaatagcatttggtaattgccgaccattttattgcccgccatcacataactccacaagccgaatacctcaccgtaatgcatcggttcatcctgcggatttccgcttaaaatacccatgttcatcctcctcccatattcaatattgcacatttcataacgtgcccaagcggaggaacatttatgtttcagcggaaaagatttatgaaatgaaacaaaacaaaaaagacaagagtggcaagttgccaaaccattgtctttcctgttgtttgattggacgcactgaagggattcgcaccccgacagacaagataccggaaaccattcaagtgctttttaatatgagtcattgattctgtctttaataaactttaacgagatggcgggatgctttgcggaaaacgaaatacattttcggggtcatatttcgcctttatttctcgaagccgcgcaaagtttgcgccataatattcttttccgaagttttcaatgttttgatctggaacattaacatatgaacctgctacatatggttgcatcagctgacgcactctttcaactgatgcaagatttgaatcttcttgtgatttatttttccaactagccgtccattccgtataaaatattggatggcgccaaaaaaaggcagtttcgtctttagggactctgcttatagcaccaccccaattgataaaaaagaaattggcatctgttccagtagcgtcttccaaaaattttctcatgattgaaatgggttcgtcagaccaaaaatcatgaccccaagccgaggagaatttaacactctgatcatttctgccagggatgggttcgtcagggtctaagaaatctatagcatctggatagtataatgttttgatatctgcttctgttggagttcccgcatgtaataaaggttttaataatcgaatcaattcagttttcgaaccgaggaaaattccttctgcatgacacaaaccatttattttgctgtaaatttcaaggtagcatcctaatcgttcatctacaaacggagcccatttctgccaagctttaaataccgtttctaattgttcccacggccagataatattgaagacggttgcagttttaggggcacgatgaactttgaatgtatattgggtattatatccaaagttacctcctcctccgcctctagaagcccatagcaaatcctcattgtgagattgatctgcatgaataatccttccttttgcatctaccgttttcagcgcgagaaggttatcacttataaggccaatcgatcgtgagagtacaccaaatccgccgcccatcgtaattcccccgattccaactgttgggctatctccaaacggagccataaaaccgtctcgagctaatccctttacaagcgggccaacgggaataccagtttgaacggttgcaatcgcgttttcttcatctaagaaaactttattcatgtcactcacatcaataacaattcctccacttactactgaaaggttcttatctaaagcatggcgaccgcttctgacacgtaagggcactttattctcacgagcccatttaatggcattacttacatcgtatgaattttgcgcaaaaacaaagacaagaggatagacatccacataagggttccaattcttaatagcctctgtatagccggggtctcctttgaaaattacacgccctgtcaactgtgttgatcccatatattatttcactcctaaagaaattcgattcagatactaaaatatgcaggagctggataatcgcatagacaaatgatctacgaactataaatataatacgctaaggcctttttcgtcggtaaggtctgctgagaaacatttttcaaacaattttgagcaaacttcctgtccaatcctccaacaagcgttttttcttatcgtttttaggagcagtgtccagtttttttcggagtgaatattcgtttaggccaaaagaaaagagagatgaagaagtgtttagtaccagaggtatacatccatacaacagactctagatcatcatatactgaatgtatgtagaaaggagacatcagctttggcaaaatatcggattatgacctttgacggcggcggtaccttaggtgctttaagtttgcaactgttaaacagattggctaggcaaaacccgaagttaattagtcgaacccatgtattttcgggaaattcaatcggttcatttactgcccttgcattagcaagcggaagatctccgagggaaacacttcagtattttgaggatgaaatcctacccgcattcagcatttcccggccaggcggacctgttttcaaccaacaattaccctattccggttttattaaagcggtaagaaattttttcccagcagatcttcaacttatagatttaagaaaacgaattgttgtcccatcattcaaattatactctcaaaaactggatcgttggactcctgtcttatttcacaattttcccggctctccctatttaaatgagaaagtaagtgatgtcatactgcggagcagcggtgctcccgcgacgcaacgggcctatcaaaactatgtggatgggtatgtagtagcaacgaaccctagtacagccagtatcgcgtttgcagttggtaaagccaatgtgccattggatcaaattgcggtattgtccatcggaacaggtgaagccccgacccggttaagaagagatacgaagggatggggaatggtaagtgcagataacatccgccccgaaaatctgaagaaccttcctccaaattggggagttcttttggacaggtcgcctaatgaacctttactgccatttcttcagatgattgctggcggtaatgggtactatgaatccatggtcagtgcgaatcttctgggagatcgttttttccggttagatccacggattccgaacttctccaaaacggaccctgccgtcgttcccgctgtcattgaaattgcgaacaaaaccaacttacagcctgcgattcaatttatagagaagaactgggggagtaaataaatttttattttaaaactattctcacttatccaattttgtccgagagaagattctcaaaataaatacaggcaatgggtagaaccggatttttttaaaggtttgttaatcacaagctaataagatgaatgaaaaaatcaattcatacttcttcttttgaaagtgagggttcaaactaaagaatgtaattgaaatgttactctaaggtatgcaattccctttttcacacaaaaaagacaagagcggcaaatcgccaaacccttgtctttcctgttgttctattggacgcgctcggagggattcgaacccccgacagacgtggtaccggaaaccaccgctctatccaactgagctacgagcgcagaatgactgcgttatgagaacgtcagcacaactaattatacgataattccattcaaataacaaccctctatttcgagaggccgttttttaaatagacaaagcatcttaattggcaatctgacatacgatggtttgaacccctgtatttttggggaaaatgggaaaaagagacgactttgcatatcaggccagctttttgtttgacctttattgaccaaaaatgtatcatgtaactacatacttacctaaaaggtgaaggaggagcattatgaatttaatacctacagtcattgaacaaacgaaccgcggggaaagagcgtatgacatttattctcgtctattaaaggatcgtatcatcatgcttggatctgcgattgatgacaacgttgcgaactccatcgtgtcacagcttttattcttagcagcagaagaccctgaaaaagaaatttctctttacatcaacagcccgggcggctctattacagccggtatggcgatctatgataccatgcagtttattaagccgaaggtatctacaatttgtatcggtatggctgcgtcaatgggcgcgttcctgcttgcagccggcgaaaaaggcaaacgctatgcgcttccaaacagtgaagtcatgattcaccagcctcttggcggtgcgcaaggtcaggcgacagaaattgaaattgccgcgaaacgcattctcttgcttcgcgacaaattaaacaaagtccttgctgaacgtactggccagccgcttgaagtgatcgaacgcgacacagaccgtgataacttcaagtctgctgaagaagcgcttgaatacggcctgattgacaaaattttgactcacacagaagacaaaaagtaataacacaacctgcaagagctgcgtctcttgcaggtttttttcatttcaaggaattgactcccttaaacactttttgttctatactgctcccatccctcatgtaacagctcaagcgtcaaatcattcgtctgcctcacaaccagatcagcaccaagcatcggctgtccttgaccgacaccaaccgcaaacatccccgcagatttgattgcagaaatgcctgcttctgcgtcttctattgccgcgcaatcagcaggggaaacatcgagcatcgctgcagctgttaaaaagatgtcaggatcaggcttccccttcgcaagagtcgtcggatcaacaatggcatcaaaatcatcgataattgccaaacgtcttaaaatcttaggagcattgcgacttgaagatgctaacccgatttttatattttcgtttttcaattgacatagaagcctgccaatccccggtaaaagatcttccggcgtcaatttgctgatcagcatttgataatcgcgatttttccgatgcataagctcttgtttctccgcatttgtatactttgtttccgcaccgccaaagatcaatatgctttcaagtgactcttctctgctgattccttttagcctttcattcatgtctctgtcaaaagggatattaatttgttctgcgatgtgcttccaagcgagaaaatgatattcagcagtatctgttatcactccgtctaaatcaaaaatgaccgctttcatatactaatgcccatcacagcttcataaggtttgaggctaatactctttaagtccgcccgctcctgcggatagtttgaaatcagcactttccaacgctcatgaatcagttctggaggcgcttcgaacagagccttttcttccgataaattcacaacgacaagaagcttttccccttgatattctcgaaggtaagaaaagacctgcggatcattctcctgcaaaagctgataatcgccatatatcataatcttatattgctttcgtaattgaatgagcttctgatagtaaaagaaaatcgaatcttgatctttcaaggactctttcacattgatatcttggtagcgggaatttaccggtatccacgggtttccggttgtgaatcccgcatgttttccggcatcccactgcataggtgttctcgcatgatcccttccttttatcatcacggctttgagaaactctttttctgacatcgttttgttttcgacgactagttcacgatatgcattctttatttcaagatcatcatacatctccagcggcatatcgctgttgaccatgccgatttcttctccctggtaaataaacggcgttcctttcatgccgtgcagaaccgttgcaaatgccttcgcacattctttacgcagcttcccatcattgccccagcgggaaataaccctcggctggtcatggttctcaaaatacagggtattccagccgacattcattaacccggtctgccaccttgtcatcgtcttttttaaagcaatcaaatcaaacggcttgatctgccatttcccatttggcgagttttgttctgtatcaatatccatatgttcaaatgtaaagatcatattcagctcttgcctgcttgcatctgtgtactttttcgcctcttcaatatcagagccgtttgcctctccgactgtcatgcagtcgtaatgagaaagcacttccctgttcatctcttgaataaactcatgaagacgggggccgttagagtgataacggccgacaatatagctgcggctgtgatccgtttcgtagtccggaaaatcggtgtatttagaaatagagccgatcacatccatccgccagccgtcaacgcctctatccatccagaatctcattacatcataaacttcccggcgaacggcttcgttttcccaatttaaatcaggctgttttttcgaaaagtagtgcaaataatactgctctgttccttcatcgtatgtccacgctgagcctgaaaagatcgatccccaattattcggctctgagccgtccggtttaggatctttccaaaaataataatcccggtaaggattgtccttcgacttgcggctttcagcaaaccaagcatgctcatctgatgtgtggttcacgaccaaatccatgacgattttcattccgcgtttatgggcttcatcaatcagctgaaacatatcttcatttgtcccaaacttttcgtacatgtttttgtaatcgctgatatcatatccgttgtcatcctgcggggaatcaaataccggggagagccagatgacatccgccccgagatttttgatgtaatccagcttttgaatcacaccttgcaaatccccgaatccatctccattggcatcataaaaactgcgcgggtaaatttgataaacgacagcttctttccaccattcactcattaggcgttctcctttcacatcgtccctgtaggacaactggttcctcataaacgttcatgtgcagcggctcgccttttacaagctcaaaaataacgcgcttttcgtcaaccgtcacattgattaatcgatttcgataattgatgttgaatgaatattcgtcccattctttcggcaaaaacggagcaaatgacagcgtctcattcgcggtgcgcatgcctgcaaagccatgaacgattgccagccagctacccgtcattgaagtaatatgcaagccttcttccgtatcatgattgtaattatcaagatcaagccttgctgtgcgcttatataattcgagcgctttcttttccagcttgagttcggctgcgagaatcgcatggacagagggcgataggcttgattcatgaacagtcatcggctcataaaattcaaagtttcgccgtttttcttccattgtaaaacggtcattaaaaagataaatgccttggagaacatctgcctgcttaataaaattggagcggagaatcttgtcccatgaccaattctggtaaagaggccgttccgctggatctaattcgtcaactgcttgcaggtctttatccaagaacgtgtcatgctgaacgaaaatttgcagttcttcactatacggatagtacatgtgctggatgatttctctccagactttcaattcttcttcctgtacatccagaaggcggcgtttctccgctgagatactttcgagactttgtagagtatactccaacgtccaagccgcaatgacattcgtataccaattgttgttaacgttgttttcgtattcattcggccctgtgacgccatggatcatatacttattttttcgtttcgagaagtgaacacggtcggcccaaaatctgctgactgccacaagtacgtctatcccgtattcttccatatagttacggtcgcctgtataattgatataattgtagatcgcataacagatcgcgccattgcggtgaatttcttcaaaggtgatttcccattcgttgtggcattcatcaccggtgaacgtcaccatcggataaagtgcccccttcatccccaattttgccgcgtttcgttcggcagcctccaactgatgatagcgatacaaaagcaggtttttcgtcacctccggctcggctgtcgccaaatacatcggaacggcgtacgcctcagtatcccaatatgcggcacctccatatttctcgccagtaaatcctttcggcccgatattcaaacgggcatcgcccccgtaatatgtcgagaataactgaaagatattgtagcggattccttgttgaagctcctcatctcctttaatctcaatgtccgcttttgcccatctttccttccatcgatcagtgtgcctccgttttgcatcttcatagccgttctctaccacatccgccaaaagctccttggctttcgataaaagctcttcctcccgaaaatcacgggaagtcgtgacaatcacaaactttttcaatgatgccttcgtttggtagctgtagcgattctcgacatacatttcattcgttttaaagcttttattgacaaaaccctccgtctcatttgccattgcggctaaaaccgtgaagcgcggtgttccaaatggattttcgatcgtttttgccgctaaatggccgctgtgagaatcagcacctttcgcttcctcctgccaaaactgttcttggtagttagaatcttcatttgccacatttccatccaggtaaggaacaagcgtaatgacagcatctcccgtcaggcactccgcttcataatgaatcgcacagagttcttttacagcaaggctaagaaaccgctctgacctgattctgacggatttatcctgaatgcggacaacagcgcttcgccgcagaatcccctctttcatattgagttctacctcaaatgattcgattgggttttgatggagatcgattttttcaccgtcaacatataggcctatgcccataaagttcatcgcattgatcacttttccgaaatattctggatacccgtttttccaccagcctactcgcgttttgtcggggaaccacacgcctgcaatatatgtgccttggtgactgtcgcctgaatagccttcttcaaaattccctctgacccccatatagccattggcaagagacgtcaggctttccagcagccgtgtatgctccttattaaatgtatttgttttgattttccattcatcaatctcaaataaccgctgatttatcatcatttcctcccgaatgtaagtttccattatcacggcgggttttggtcaaatatctaaatgcaaaagaaatcatcaaagtaacgccacacgaatggatcatcaatacagtaatcaaatcaaaatgaaccatgccgatagcagctgccgcaaatgccggcagtgccgaggcgcaaatcgccgtagatactgcttccttgaatgacgcaatagagatcatgtttgatatttttgtgatccagaggccacctgcaagaacaaacgttaacaaaagctggatcataaagattaccgcatatgccagcatcatgatcatcggcttatactgtgccaaccataatgtatcgatcaaaacctctacatcatggacgtttggtttctcgagcttaacgtccattttcgcatagccaacagaaaaccccgtttcgttttgatcggtgatcaccagttgatcaggttgaaatatgatagcgttttcaaatccagttactttcaatcgcccattttcaccgcttgtctcatattcatgcttcatatcgactgccatcacattctgcccatcttcaatcctctcagaactcttcccgcctgttagttttccgttcctgatttgaaaaccctgtaattgatcagcaaattgatcattaaccccttgaatcgctgacggcatgaaagatgcaacgctgaagcgatccattttcacaaacgaaaccgctaacggcgtcattaagcaggccgttaaaaacagaaagagaaaagagagctgcagccagctgaaagtattcccgtaacggcaaacacctgatggggatgcacccgccttcaggcagcggatgataaagcttttattctccagattcttcattggcattacccctttgttccgccggctgtcaatccggacacaaagttcttttggagaaaaaagaataagacgcatatcggcagcgcggcaagtatggcaccggctgcaaatagagctactttttgctgctgcggattagaaataaaggattgtaatcctacagcgatggtcagcctttccggtgagcgaagcagaaatttcgccagcaaatagtcgccaaacggtgccataaacgcccaaagcgcttgtaccgcgagcattggcttaacaagcggcagaacaattgaagcgaaaatcctcagatgtcccgctccgtcaattcgcgcggcttcatcaatttctctcggcacagtatcaaaataacctttcatcagccacgtgttcatcggaattccgccgccgatatagatcgctgttaaaaaccagtattgatcgagtgcgcctattagcatcgccaagacataaaaagcagtcagcgccgccattgtcggcaccatttgaatgattaaaaagaatatcaggctcttttttctgcctgcaaaccgatagcggctgtacgagtacccggcaagtgtcacaatcgtaacctgcaaaaccatgaccgatagcgcgatgacaagtgtattgctgtaccaatgaagataaagcgtttcttcaaatagccgcttaaaatgatccaacgtccaaggacccgaaaaatcgagctgaaaagccgccgaattccccacacggaaggctgatgatgccgtaatcagcaacggatatataatgacaatacttaaaagcgtcaaaaagaaatacgtacagattttattaagcattctggcagtgctcgcgttcacctacataacctcctcattgccaaaagcattcgattttttgaaagcaatcagtgaaattccaatgacaatgaaagaaattaacagtgtcacagccgccgcaacggaatattggggtgatgtgcctgttgtcagtttataaatccacgaaattaagatatcggtcgatccggccccggctcccacactgcctggccctccctcattaaataaatagatgatcgagaaattattgaaattaaacgtatactgagtaatcatcacgggtgctgtggcaaataaaatcatcgggaatgtaatatgccgaaaacgctgaataaaagtggccccgtcaatctttgccgcttcatacaattcacctggaatcgcctgaagcactcccgttaccatgacataaatatatggaaagccgagccacgtctgaatcataatgagggctgtctttgtccagaaaggatcagtcttccacgcgatcgcaggcagctcaacaaacggcaggtgattgaatagtggaatcacctgtgcattcaccgctcctatgctgtcgttaaacatgttggaaaaactcatgattgtaataaacgccggaacagcccatggaaataagaaaatcattcgaaatatccgcttgccttttataaaatcctgattgacgaaaagggccgtcacaatacctaaaatgatttgcagcgttgttgcacagattgtccagataaccgtccagcccagtacattcacaaatgtttcacgataggagccaaggaaaaaaatattcaagaaatttttaaacccgacccagtcaatcagacgattaggcggaatatgataaaaatcatagtttgtacatgcaacaaacagagtcaccaaaaccggaaagataatcacaaacaccatcatgatatatgccggcagtgtaaatagatatggaaaccctttatcgcccgcatgacagatcatatccttggctattgtattgacttccaaacccgccgctttcatagcggcggtcttacgtgaatcatgaatattaaagatatagaacatgaggaaaatcattgtcacgatcaattgcagcgtgccttcaatcagcataaacagcgagtggtcttcaccgggaacacttcccaatgtcatcaatccggttagcgcctgtataccgaaaacgcataattcaaaagcaaacaagcctgtaatggcaagaaataagagcccctttgacaattgctgattcgcaatctgcccaagtcctggaatgatcgataaaagccctgcctttcgtttttgctttgcaagtgtgtgatgtttattcattttttccgccctctattcttccggacgctatcccgccgttttatttcacatacttttctttaatattttcctttatgacgtttacagcatcattcgctgatgtttgtgtcgatttttttcctgaagctgcatcaaaaattaaactttccgctcctgtccatacttcagccatttccggaatatttggagtcggcgtcgctgtttcatattgtttaatcacagctgacgtcagttcattcttttgctcatcggctttcctccttgcggcagtgttggccggaacttcgtttgtattctgataaaaagcgtaagcattggcatcatttgcagcatactcaagccatttttcagccagctcgggctcttttgtatattttgaagctacccagcccttcccgcccgcaaaaggggcatattcttctccattgggcaatgtcggaatgggagccgctccgtagttcaatttagcctctttatagttggcagctgaccaaggaccgccaatgatcgcagccgctttgccttctaaaaacatctgctgaataaagtcgtctgcgcttgaattgtcttgcattcctttcggccaatatgtttcaaaccatttctccgcatatttcaccgcttctacagcccctttattgttcaggccgatgtccccggaatctgtgccgttttttccaaacacatatccgccgtaaccagccaataagccgtacgacatataaaagtcagtccattttgctaaaaatccggttgattttcctttttccgaagcaaacgcgaatcgaggatcttccgttaacttttcaaggtctttaaatgtttttggcgctgtttttaaaagatctttgttgtaatacaaaataagtgtctcaatgactagcggcattccgtacactttgccgtcaactgtcacctgctgcatttctttatcaccaaagctttttgtgttagatggcttaatatcaagtaaatgtccttgttgtcccaaaccgccgatccggtcatatgcagcaagcataacatcaggcgcattacccgccgggccatcaagaggaagcgcttctaactgttcgaacatttgcttttcaacaatttttactgtgacatcattctctttttcgaactttgtttttatgctttcaatgtattctttatacgtttcttcgacggacacagtcagcacctttttgccatcagcgcttgctggattttttgaacttgagcaggcggcaaggccgattgccaggaatgatgccgccaatatggcgaaccccttttttaaaagaaccatctcttttcccccttctatttacgaaactataacaattgtattgtcctatagaaagcggttacaacaacttttgatttgttaccgataacagaatgttatacaggggcggcagcactcaaaatcaaaaattctcccggctgaacggtaatgacatcgtgatgctgaagcggctgctctgtccatgcatcacagatcctcttattcctttcaatattcaaatccagtaaactgacatgttgaaccgcattcccttgattaaagaaataaatcagtattttttcatcaagagtccgtgaaaagctaataaaatcgttttggtcatccagcagattccactcaagatgtccttcagtcaataaagtgttttcctgcttgcgtaaagcaattaaccgtttcataaattgcagcatgtcttggttttgcttctctttttcccaaaccatacattttcggcataatggatcattttcgccgttcagcccgatttccgttccgtaataaatgcatggtgagcctgtctgggcaaacataaaggccagcaacgcgcgtgctttcttctcatcattgcggcatctggtcaaaaggcgctttgtatcatggctatccagtaaattaaacatcacctcattggcctgcttcattccattcatcaaatgtgcattgacacggtgagccatacgtgaagctgagatcgtctggtcagcaaagtattcaatcataggctctgtaaaagggtaattcatcgccgcatgaaattcatcccctctaagccagggttcggcagaatgccagatctcacctaaaatataaacatcaggcttttcagtagatacagcctgcctaaatgtcttccaaaaagcgtgatccacttcatttgcgacatccaaacgccagccgtcaatgtcaaattcgcgaatccagtacaaagcaatatcaagcaaatatttctgcacctcgggattagccgtgtttagcttcggcatatcagctgtaaaagcaaacctgtcataattgtcgtctgtgacgggaaaagagtgaatatggaaccagtctttatagcgggattgatctccgtttttgacgacatcctgccattgcggagacgcgcttcctatatggttaaaaaccgcatcaagcataattctcatcccccgctgatgcagctggctgaccaatgtacgaaaaagctcaggatccccgaaatgcggatcaatagaaaagtaatccagcgtgtcgtatttatgattagaaggcgcggaaaagatcggtgtcagataaatgccgttcacccctaaatcctctaaataatcaagcttgtcaacaattccttgtaaatcccctccaaaaaaatcattgacgcccgggtccttgctcccccacggcaatgcattcttcggtgacaagtcttctcttccatttgcaaaacgctccggaaaaatttgataccaaaccgttgacttgacccattcaggcgcttgaaatgtatcagcctcgtgaacaaacggaaatttaaagtaataatgaatcgtttccagtgttttttcgttataagggcatacacccgaacttccgaaaaagatgtcttcatgatcgtctgttacaacaaacgcatattgtaaacgcctaaatggcggcaccacttcagcaaaccaatagtcatgcatttctgtagcagcaattttcctcatcggctgctcgtttgccgaccacttgccgtcgttgtactcatagggatcaccccaaatgaatcgaatgtgatctgcatcacctttttttgtccgaatcttgatatgcacagcccgcccatcataagaataagcatctgtgctgaatggctggtggtgaatcgctgcatattccatcatgtttccccctttgatttccgttttattgaagccggctcatagtttgaaagtatcatgatgaaattgtgggaacaatccttttcaccctgttaccgataacagaataaggcgcttacagcgttgattctcgtacaattaactctggttcaaaaaatagacttccttgtgcagcaccgtcttcattcatttttttcagcaacattttcgcacaggcttcccccatttcaacaacaggctgtctgaccgtagtcaagcgcggcgaggagatgcgatcaagaaacacaccgtcattcccggtaaccgcaacgtcttccggaattctctttccaagggattgcgccgcacgaatgacgccgagcgcgattcgatcagatgcgcagacaaatgcggcttgattgtccatggatttcagcagttctcttgcaaggccctcacttttcttagaactgttgtcgatccgaaacatattcgattttttaaagcttttattcatcgcccgtatatacccctgttctcttgcacgttcgaaaggctcatctaaatcaatgccaaaaaagacaacttcccgctcccccagccccataacatggcgggttgccataaaagtgcctttctcgttattcacatcgataaagtcatagcccatttcattttgtccaaatacgacgagcggcttctcaaacgcttttattacaccttcaaaatcgttctttctcaagccggtggcaataatgccgtcacattggccaatattaagagaatttcttgtcacaagctggagagcatagtgattgcgatccagctccctgctgattcctgtcagcaggttcatgtaatatggttctgtcgtatccatttcctcaagtatcaatagtttcacaacctgtgttctgttttgcacgagcgctctcgccgcataattagggatgtaattcagctctttcatcgcagaatgaacaagctttttcaattcatctgtcaccgtctcagggtgattgatcactcgtgataccgtcattttcgaaacatttgctttttttgccacatctgacaatgttgccattttcatcccctccttatctgtgcttattatccaaactagtgataaagtcctctattactgttaaatatacgatgcaggcaaaagagaaataaaaaagagatttcccttaaggaaacctcactttgttaaaaactctcgatttttcatggattcatacgctaggtggcagactcattctctccacttccatgagaaagtctcttttttaaatttctgtccactttttttctaaaatcggataagaataattttgcatttgctcaattaactcatccggccgtgacgagctgtgaatcagttttaggtgcgattcgttagaaaacccttcttgaatgctgtatttcaccattttcatcattggttcaaaatatccgtttacattgtacagtccgattggcttttggtggatgccgatctgtgcccagcacagcacttcaaataattcttcatatgtaccaaagccgcccggcatcgagataaagccgtccgccagctcgctcattttagcctttcgttcatgcatcccgtttacttcaatcagctcagtcagattctgatggacaacctccccgctgaacaaaccgctcggcatgaccccgattgcagttccgccgttttccataatcgcgtcggcaatcgtgcccatcaagccgacgcgggagcccccatagacaaggccgattccctgctcagccatatacacgccaagctctgccgcttttcttttatacgcttcatttcccccagggtttgatcccgcaaatacacaaatggttttcatcttgtcatctccgcatctatatatcgtgttaaacattcaaaaacacactatatattgtcccatcttcatgtgataatatcaatatgaaatacataaagaatgcaggagtgatgaggttgcagctggctgatgcagaaaaatggatgaaagagttttacgaaaaaagaggctggacagaatacggaccttttattcgcgtcggctttttaatggaggaagccggagaattggcccgggctgtcagggcgtatgaaatcggcagagaccggccggatgagaaagaatcgtcacgcgctgagcaaaaacaagaattgattgaagaaatgggagatgtcatcggaaatatcgccattcttgctgatatgtatggtgtctctttagaagacgtcatgaaggcccaccaagaaaaactgacaaaacgatttgagcatgcataaaaaagcggccgcgatggccgctttttttaacctgtgatttcatcatggtgatcaaagaaatgctgctttcctattttgtgaaaaaggcctgttttatgcagcagctcctttggctgcgattgcaatcctacaatcatcagctttccattgtggcgtttaatccgattcataatgttcccaagcaccgcttcagctgacgtatccatatagtgcaccttattcatgagcagaatgagggttttcggttttttctgtacatgctccagcaatgacgattcaagggaatcaattgatccgaaaaacaacggtccttctatggcatacatgctgacagatggatcttctctcttcgccagaacaggatgcgattcctgattgtggatgcgggtcgcttcgctcattcttctgataaagaacacaaatgcaagcagcaatccggttgccacaccgatgattaagtcaaacagaaccgtaagggcgaaggtcgccgccaaaataaaggaatcagcgtttttcagtctcagcatgtttgcgacttccttgcgctcactcatattccatgcgaccaccatgagaatcggtgccatactggcgagcggcacatgggacgcataaggcgcaaatacaagcaggacaaggagaacgactacgccgtgaacgacgccggaaactggggaaaccgctccgttttttatattggtcgccgttctcgcaatcgctcctgtagccgggattccgccaaacaggggcgctgccatattcgcaattccctggccgacaagctccttattgctgtcatgctttgagcccttcatgttatcagcgaccattgcggacaaaatcgactcaagtcctccaagaagcgcgatgacaagcgcagccggaaacagcataaccattttatccaaagtaagctcaggaaactgaaattcaggcaaatggcgggggatttctccataagttgacccaatcgttgccatgcggtcagggaaaaagacaaccgcgaccactgtggaaataagaagcgccaacaaagcgcccggcactttaggcatcaccttggcggatacaagcaaaatgacgagcccgatcacagctgtcaaaatggcatatacgttaaaggtgccgagctgctgtacaatttcaaacatgttgtggtgaaagttctcatgtttttcaacatttctcaatccgagaaaattagcgatttgttccgtaaagatcagcacggcaattccggctgtaaaaccgacgataacgggtttaggcacgaatttcattatttttccgagcttaaacagcccaaacagcaccagcattacccctgccataaaccctgcgatcagcagattctctaatccgtactgcatgataatgccgaacagtatcgggacaaaggcgcctgtcggaccgccaatttgatatttagatcccccgaacaaagagatacaaatccccgctataacaacagtgtacagcccgtattcgggctcgactcccgaggcaatggcaaacgccattcctaaaggaattgccacgacacctactacgatacctgcaattaagtctttctgaaatttctgtaaattgtatcccttgaatctccctgagaatcgcatattttgttataacctcccttatgagtgattgtttattagctcagtttcataaccgttaatgaccacatcaagttttcctgtttcagggtgaatgacaagcccgtgaaccggcacttttttcggaagcagcggatggttcttaatcatgttcacactgtgggaaacgctttcttccacgctgtgaaaaccagtcagccacgttttcaaatcgagtccggcactcgtcagcaaattcaggcagctatcctccaccccgcgttcctttgctttctcaagaatcgaggacgcattcagccctgacattccgcattcatgatggccgacaatgcatacctcttcagcctgcaattcataaatcgcgaccagtatgcttcgcatcacgcttccaaatgggtgagaaacgatggctcccgcgttttttacaattttagcatcaccgtttttaagccccattgcttgcggaagaagttctgtaagccttgtatccatacaggtgacaatgacgagctttttcgaaggaaactttgtcgttttgtacggttcatacttcttctcactgacaaaccgctgattgtgttccaaaattgatgttaaagaaaccatttgattcatctcccatccatatgattttgcaagccttcttacccagcttacagtaaggaattatagcataggaataagccaagaaaaggctttcaaaaaaagacactataattggactgtagaatcaaaacataaacatttatatctttcaaagataataaaatttatatttaatgaatcctataatccggctgcagctcgcatattgatgatttgtctgacaaaaaatatgggtgaattctgataattaaaaaacttttttaagcagatatagctgttcgatcttcattttaagttcaaaagaaccagaaactaaaaaaacgcagctatatttttaacacctatttattttcgatataatgaaatagacaacagccataaagggggagccttgttgaaaccatttgtatttatcacaaaaccgattcctgaagagattgaagcattcatcggtgaacattgccgttatgaagtatggcaggaggatacgcttccgagtgacgtgctatttgaaaaattaaaagaagcggagggacttttaacatcagggacgtccgggccgtcaatcaatcgtgagttgctggaacacgcgcctaagctcaaagtggtcagcaaccaatcagtaggctacgataacttcgatatagaagcaatgaaagaaagaggagtcgtcgggactcatacaccttatacactggatgacacagttgcagatctggctttttcactgattctgtcttccgccagacgtgttgccgaactggaccgttttgtcagagcaggaaaatggggaaccgtggaagaggaagcgcttttcggaattgatgttcatcatcaaacgttaggcattatcggcatgggcagaattggagaacaagcagcgagacgcgccaaatttggttttgatatggaagtgctttatcataaccgacatcgcaaacaagaaacagaagacagcatcggcgttaagtatgcagagcttgatacattgctggagcaatctgattttattcttctcattacgccgctgactgatgaaacctatcacatgataggagaacgcgaatttaagttgatgaaggattcagcaattttcgtcaatatttcccggggaaagacagttgatgaaaaagcactgattcgcgctcttcaggaaggctggatcaggggagccggcttagatgtatacgaaaaagagcctgtcacccaagataatccgctcctgcagctggataatgtcacgctgcttcctcatatcggttcagcaacagctaaagtgcgcttcaacatgtgcaaacaggccgccgaaaatatgctcgcagcgatccaagggcaaacaccgaaaaatcttacaagagaatttcaataaatcaaaaatccggtctgataacagaccggatttcatattacatacgctgaagaacagcacgcttataaatatgacgggtgacgatataataaagagcctggaatacaaaataaatgaagatgacaattacggcctcaagaaataaattggaattcagcatattacttaacgctgcatacgcaaagcccgcgtgaatcgtacctgcgataaatgggatgaagaataaaaatcctatttgctttccaaggatcgagtgaatctctttgtccgtaacccctatcctctttaacgctaacacctgcactctcgtatcttctatttccgtaaacatccgcaaatacagcatgcttccttgcacgataaaaaacagcacgctgacaaacagaccaataaacagcattaatgcaactccctgcttcacaatttgataactaggagcacgtgtttgaaaatcagatgtatgttctttcggcaccatgttttcaagcttttcagagacatccaccgtctcctgccaatgctcaagctcataacctaccattctcatctgttccttcagcggcacatcctgtgacagactgtcaaagctcttttcgctgacaaccaataaacggctgactccatcgacagacatcaatatccctttgttttgctgctttttcatgacataggaaagggtttttcctgacttcatatgaaatgctgctgtttccccttctccaaatgtgtctttcaccatcatttgaaaagaaacattaataaatgcttcattttcttgtaaatgaataactgggaaccctttttcctttgcgacttgattatagactttttctgaaatcagcaaagcttcagcttccatcttcttatttccatacggcaagtctgactgaaaagtgacaggaatccctgtggcatccaccttatacttgataacagcatgagcttttttcaatgtattctcagctgtctcaggcttcatgacctgaaagcgggaagcatccttttccacccaggaaacagactgaggaatgctttgctcctcctgcctttgtaaatcggaataaaacatatagatgacacctgtagctgttagtatgaccgctgtaatgacagaggttaaaaacagcatgcgtgcatgatccttcagcctgaatatcatgttggaacgcacaatgatattcgtgcctttgtagaagctgtgtttctttcggtacagcatgcggaaaaacgccacactgctttgtgtaaaaaagaaatacgtgccaactaacactaaaatcaaaattggaaatacccgaaacatcatgtcaatggcattggctgttgcagatagataataaccgctgccaagacatagcaaagacaatacagtgagccatttcgaataaaccggcaaacttttcggctttttggccgatttaatcagttcaatgatttccagcttccgaatccgtcccagtgataaaatgagcagcgtctgaaacaggatgagaaagccggcaattgtcatcacaaacgctttcggcacaatggcaaacgaaatcggcaccttcacgctgagcatccatgtcataatcataaaaaacagttttgaaaataacaggcctgctccaatgccggccgcaatcgccgcaagagaaataagtgactgctcataataaatcatcttgcgaagctgctgctttgatgtgccaaacagtgtcagcagcccaaactctttctttcttgcctgcaaaaacgctgaattggaatatgtgatgaaaaatatacaaaacacaatgatgacgacaagagctgcgctcaagcatgttttgacaaggcttccgccatatatattgtcttcattgacatcaggatgaaaaataaatgatgtgaagacaaaaaacaccgaaacggcaaacacacagcttaaaaagtaggccacataccgttgcagattcccaagaatgtttttacgggcgatagttctcaaattcatgaaaatcgcctcccaacacactcaaggtatccaatatactttgataaaacacctgcctgtttgttcctctgtgaatctctgaaaagaaacgtccgtctttaataaaaacaattcgtttacagaaacttgctgctgtggcatcatgcgtaaccaacagaatcgtcgcttccttttcctcattcagctgagccagtgtgttcatcacttgctttgccgattttgagtcgaggtttcctgtcggttcatcggcaaggatgagcgccggattgtgaataatcgctctggcacaggctgcccgctgctgctgtccgcccgaaacctcatatgtgcgatgatcgagaatgtgcttgatttgcagcgtatccgccagttcatccaatcgggcttccatttctctcagctttaccttatccaatgcgagcggcaagagaatattttcacgaatcgtcagcgtatcaagcagattaaaatcctgaaagacgaagccgagttctcttctgcgaaacaaagccagctcttggtcctttaacgttttcggctgaatgccgttgatcatcatctcgccctgggtcggcttatcaatggtagccagcaaattcaaaagcgtggtttttccgcttcccgacggccccataatcccgacaaattccccttttgacacactgagatcaaaggcgctgagcgcttggtatgatattgttcctttatttgaatagtacgttttcgataggttcgttgtttgcaacacgttcatgttctgctcctcctttttctttattataaaaaggaagtcagcatcctcccatcgaactttcttgcaattccgctccccaaccttacaatgctgtcacattcacgagggtgtcacttgaaaacacgatggtcatcacagtgccagccccttcttttgattccgcatacagcttatggccgagacggctgcacacctgttttgctaaataaaggcccattccagttgcctctttcatggttcgtccgttttctccggtaaaaaacgcgtcaaaaatccgcggcagatcctgtggcggtatgccgattccttcgtcggcaaccgacaatcgcgtctcatgtccctgtgtttcaatccggattgtaatagggtctcccacaccttgctttgaatattttaaggcgttgaaaaggatttgctcgacaacaaaggaaagccacttttgatcactggaaatctgaacggcatttggcggcacatgtaatgttggaaaaaggcgccgtttaataaactgacgtttttcctgattgatcagtgaacgaaccatttctgccaaatcaaaggtttgcggctttacatcaaatgcaaattcctccagccgagccgtttgcagcatcatatcaagaccgtaacgaaatctctcattctcatcctccagctcctctaagaacgtcggaaaagaggatgaggttccgttttttccttcctgaatcattaaggatatgacggataccggtgttttcatatggtggacccattggttggtgaaggtgtaatgctgtttttgctgattgatatattgtgagagcctgctttcgtattgctgcccgagtgcgttgatcatcttcgtccaaagcacttgctctcctgttcttggctttctggctttcaaagactgtccgatgtcattcgaagaagaggcttgttctgcaagctttttaacatatgtgagaaaggaaatttgccgaacataatcaacagcaaaacctgcggctaaaagagtaccgggcaaaatccatatgtacatcatattttctttggaaggttctgcgccgctctctacaatgcttaaatacgcaatcagcatggcggaccctatccctaataatgaaaatagaataatggctaagcggtcgatgagataagtctttaacactccgcttcatccttccgattgacttgaaattgatagccttgtcctctgattgtggaaatgcaatctgtcagtcctgcattctccagttttctccgcagccggttgacattgaccgttaacgtattgtcatcgacaaaatcaacgtcatcccataacgcctccaatagttcatcacgagagacaatttttttatgctccctcacaaaaatagagagaagctgaaattctttttgggaaaacagaatacggacgctgttccattcggcctcattttgatcaggataaatcgtcagcccgccaagctccactattctagattcctgcggcaaagagggcgagtattcaccatatgtgcggcgcaggacgcttttgattttggccatcactacctctaaatggaacggttttgtgatataatcatcgccgccattttcaatcgccattacctgattcagctcatcggtccgtgccgatataaagataatcggcgcattggaaatggtacggatttgcctgcaccaataaaacccgtcaaaaaaaggcaggttgatatcaagcagcacaagatcaggcttcatttctgcaaattccaattttatatcattcagctgttcagcaattttcacttcatatccgtatttttgaagatgaccgcccagcaaagaagcaatccgctcatcatcttccacaagcaaaatccgatacacgttgatcccccttatatgtacatcacgatgatttttctagaagattccaaaattattatagcatgtgcggaatagtaaatcggtctttttctttttgttatgatagaatgataaaggtaaaattttcataataggcaggtgtcgtgatgaagaaaatcatgctgtttctggcaatgacgtcaattctttcagcatgtcagcccaactataccgggaaatacatagaaattggggatacactaactgactataccaaagagtgttttaaagagaatgaaattccttataaatacgaaaagggaaaactgtatatcccagaagatgcatttgatacagcgatctacacttgttcataagaaaaagcttgcagataacctgcaagcttttcacgttacaaaaaatgagtatttaatttctcttcaaatcctgaagggccgatgtcgcttttttgaatgtcaccgccgttttcatgaatcgtaaaatggcgctctgacatgaccatccttccgctcggcgtcagctttgaggcaagcagggatttgttaaaaggagatttttcatgagagtgaatgatgtccttcatgttatctaaatcaccgagatcactctcttcaagagtaaaggcgtacccgatttgccagccttctcccttgtccatcagcagaacatggctgcccttttctgtctcttctcttttgattcggaatgacccgactggtgactgtaccgtttctccggaaagcggtatcggctggagcgccaggttgatgccgaaaccgatatcaacgaggtaatcgccgttttccgcagacagccatacagcagcatgcgtcccttctagtgcccatccctcttgattgcctgcataaaccgttcctcgaatgagcttcacgtgaaacccggcctcacgcaagacaaaataaaggaaaccatttagatcgtagcataggccgccgtgctgatctttgagcagacgtcgccatagctcttcttttgtgatcttataattctcttttgcaagtacggcacggttttcgaatggaaaacggtatgccattgctttgagaaaaaggggaagatcgccgaagctgacatgatctttctcccagccaattttctgaaagcagtcttttagaaagtcactcatttttatcacctaaacttcttcttgaacgtaagcagccagcttctccagcgcctcttgttcatcttctccctgggcaatcaaggtaacctcagtgcctgtgcttaccgcaaggctcatcagccccatgatgcttttggcgtttacttttttcccatccttctcaagaaacacatctgacgtaaaccggtttgcttcttgtacaaacaaagcagcaggacgtgcttgcagtcctgtctttaatcgaacttccactttctgttgaaccataagatctccccttttctttacggttattttaaagtgacggtttgccctgtccgcagctgttctgcgatttcgtcaagttttctcagcctgtgattgatccctgatttgctgattttcccgcttgctaccatttcccccagctctttcagcgtcacttcctgataatcaatccgaagctgcgcaatttcccgaagtttttcaggcagcgcctccaggccgattctttcatcgatgtatttaatattttccacctgtctcagcgatgcgccgatcgttttgtttaagttggctgtttcacaattgacgaggcggttgaccgaatttctcatgtcccgaacgattctgacatcctcaaatcgcagaagcgaattgtgagcaccgattacgtttagaaactctgtaatcttttcagcctcttttaaataggtaatgtagccttttttccgttcaagcgttttgctgtttaactgaaactcatttaacaggtcacataatgaatcgttatgctccttataaagagagaagatttctaaatgatacgaggaggtttccgggttattgaccgaacctcctgccaaaaatgctcctctcatataagaacgcttgcagcatctctttttgaccagctctttcgaaatacttcgttcaaacacaaaattctccccgagtatttttaaatcctctaagatcgcttttgcattttctgaaaaacgcacaatatagacgttattctttttcagccgcattttctttctgaccagcagctcgaccgacacatcatattgttttttcagcaatgtatagatgcggcgggcaatcgccgcgttttcggtttgaacatcgagtacgagatggcggtttgtaaatgataaagctccattcatccgaatgagtgcagacagctcggcattaatgcagcagtccttcacttccagattcgttaattctttttttgtttctgatgcaaatgacatatagccacctcatttcaaggcttcattctttcagtaaatcaacaagaagagaggccactttatgtgtatcgtgacgtattacgtcatttttatacgttacaatttgatctctgatgacttcaagccccatcgctttcagctcttcgatatcaaaatcaacaggacgcgccgattccatttcgtacttacgttttatttcgtcgggaatgtcttcactgttcactaatatcgtatcaataaaaccgcagcccatatgctgattgagcgctttcacatgatcagcagcggtgtaatggagcgtttcgccgggctgagtcatcacgttgcaaatgtatacttttttcgccggcgcctttatcacttcttccccgatttttgggacgagcaaattgggaagaatgctggtatagaggcttcccgggccgataataatcaaatccgcttccctgattacgtctattgtttccggcagcggatcaatctgttcaggcgtgagaaaaacacgcttaatgcgctgtccgtattctgggatcgttgactcgcctgagaccacgcggccatcttccatctcagcatgcaaaacgacactggcattggcagccggcaaaacctttcctctgacattcagcaccttgctcatttctgtgacagcgtgaaaaaaatcaccggttatatttgtcatcgctgccaaaatcaaattcccgagagaatggcctgttaagtcattccctttattgaagcggtgctgaaaaagatcttcaacaagcggctccacatcggataaagcggcaagcacatttctgatgtctccgggaggcggaattttcagttcattccgcagacggccagagcttccgccatcatcggcaactgttacaatggccgtgatgtcaacaggtttatgctttaggccccgaagcaatacagaaagacctgtaccgccgccaaagattgcaattttcggcttttgtcccatcttatttccggcttctcttttcaatgtcccggtgagtaacatgagtatagtaatcctttttgaaataatcagctaaattctcggctaatgtcacagagcggtgctggccccctgtgcagccgatcgcaatgacaacctggctttttccttctcttttataagatggaagcataaagctcagcagatcaattaatttctcattgaacttttgtgtttcattccacttcatgacgtaagaggaaacttctttatccttgccagtcagcggccgcatgctttcgatatagtacggattcggcaaaaatctgacatcaaagacgagatctgcatcaattggaataccgtatttaaaaccaaatgacatgacatttacggtaaatgtctctccttggtttgtcgcaaagtgcttcacgattttttcacgcaaatcacgcggcttcatgtcagacgtatcgtaaatgatttgagagcggccttttaattcctcaagcagctctcgttccagcgcaatgccttcaagcggcaggccagtcgctgccagcggatgcgagcgtctcgtttctttatatctcgtgacgagaatggaatccttcgcgtccaggaataaaattcgcggtgtgatccacggattttcggccatttcatccagcgcttcaatcagccggtcaaaaaattcgcggccgcgcagatccatcacgagcgcaactttgctcattttcgaatttgattccttcatcagctctaaaaacttcggaagcaatgaaggcggaagattatcgacgcagaaatagcccagatcttcaaagctttggatcgcgacagttttccccgctcccgacattccagttataatgacaagctgaatatcatgtgattcactaacactcatctttctcccccctgacttgtctttctatttgatgtgctgcgggtctaaacgataactgagtagctcaaattccggtgtatacgtaaatgtgccgtgcagcagcccttgtcccttcatcataaaatcaaggatatggccgtctccaggggccataggcaggttctgaatgtcattgacatcgtgccactgcagtttgccctcctctgattcagacacattttgtcctgtataagaatcagcgacaaacgtaaacatcatccactcggagacaatgtggtcaccgtctttaataataaaggtaaaaacgccttttaattgaggatttatgatatagataccagtctcttctctgtactctctgatgacggagtctctgactgattctccgctctccatcttgccgcccggcgcgacccaccagccgcgtctcggcttttgaagcagaagaactttgtcatccgtctgaagcacacaatttgtcactctttgcaagtacgtcacctaaccttcgtcctgtcatcgtctatttattataccgcttcaagatgcctcccacaatgaagagacattgacaatcttttcttctattttacagcatattcattccttaattcagatgattttgctgtaactggaattctcttttatttatggacaaaaaaaggacacggataactggagaatccgtgccaaaaaagtgtattcattataaaaagggggtcaattactttattaatcataaccgaaaagcattacacatgtgttacagcggaattaaaacccagtaacgtaatgtgaaactcgtatgacagccctttttattttaaggttttcagcgtttcttggagctcttcgacataatgctgtacgctttgtgccgcaatgcttccgtctcctgtagccgttacgatttggcgcagtgatttttcgcggatgtctccggcagcgaaaatcccttcaaccttagtttccatgcggtcgtttgtttcgatatagccttcttcattcgtaatgcccaggttttcaaacggtttagacagaggaagcatgccgatgtaaatgaatacgccgtctgttttgaattcactttcttcaccggttaccgtatcgacaagcgttacgttaccgactttgccgttttcctcatgaatttccttcacagttttgttccataggaagtcaactttttcattatcaaatgctctcgcttgaagaatactttgagcacggagtttatcacgtctgtgaacaatcgttacttttgaagcgaaacgagtcagatatacgccttcttcaaccgcggaatctccgccgccaacaacgacaagttctttgcctttaaagaaagcgccgtcacatactgcacaataagatacaccgcgtccgcccaattctttttcgccaggcacgccgatttttttatattccgcacctgcagcaatgatgacagcacgggctttatattcctttgaaccagctttgactactttgtactctttgccgtcaatgacctctttaatatcgccataagcgtattcagcgccgaattttttcgcgtgttcaaacattttgttagaaagctcaggcccaaggatactttcgaatccaggatagttttctacatcttccgtattggccatttgtccgccaggaattcctctttcaatcattaatgtcgataaattcgctcttgatgtgtatacagcggccgtcatcccagcagggcccgcgccgattataatcacgtcataaattttttcttctgacacactattcactccttaaaccatcttttcaagtttgggctctttcttataagataagaatccccatcaaacgtattccttacccatatcctataaaatctcatggtgatacgctatttttttgctcaacacgattaaatgtattcgaaaagggtatatgttaataaagaaagagccttctgttttagaaggcccttgtcatatttattattgaacaacacgtcttacaacgcctttaaatgcttttttccagtaaggattgctcatagagtcaacagatacgccatgagatgtattgtcgtttaggaaagtaccgtttcctaagtagattcctacgtgtccatttgttttgtaagtgtcaaagaacacaaggtctccgcgtttcatttcagacgcgctgacagcttgtcctctgccaactaacgtatcagtagttgttccgcctacaggtccaaggttaacacctgcagaagcgtatgcccagcgtacgaatgatgagcagtcaaaaatacggttgttgatatcagattggctgcgtccgccgccaaacttgtacggagattgtcctacaatgcttgaaccaacgctgatcgcgccttcaattccgccagagttgctgataacagtgccgcctgaattgctgtttgagccgctgctcttcttagaagatgagccgtttgacgaactgtttgatgaaccgttagaagaattgtctgaagaatcatcagatgagcttgcttttgctgattcagttgtcgccgtttgactgtcatctgtttgtgtttcgtcagatgctttttgtgcttcttcctgctttttgatcaaagcagccgctgcttcttgttcttttttgatgcgtgcttgttcagcttcagtatttgctttttgatttgcaagttcagacgcctctgattttaattcagaaatcgctttagccgttttcttctggcttgcttttgcttcgtcgaaaagcttgtctttttcattaagctgtttatcaaggtctttttgcattgtttctaatttagccaatgcagcttgaacttctttcagcttgtcattcaaatccgcttcagaatcctcgagcttcgctttatcctgctcttgctgtttgattaaatctttgtctgcgtccacaatagatgaaaccgcagtcgcacgagagataaagtcaccaaagcttgttgatcctaaaagaacatctatgtatccttgagatccgccgctttcctgtaaagaacgaacgcgttttttcaggatttcattgcgtttttcgatgcgtgcttcagtttctttaatctcttttttcagttttttgatttcttcttttgttttatcattttcttcttttttatcttcgatcttgttacttgtatcaagcgccttagcgttaatgtctttcagttctttttcaatctttgattgattttcctgaagttcagttaattctttttccttcgcttcaatgctggaagcaacctcagattgcttgctttcgattttttgtttcttttcatctaatgtttccgccgatgcagttttacttgtaaatgggatcaaaaaactgcttgtcccgatgacggaagccaaaccaagtgtcaataaactctttctcactttttatatcctcccttttactgtgaacctgtcctcatttggaatcgtattttgaacatcaagtttcgttcctcatactctacgaggaatgatggttgtttatggttaattattctgtgcatctcttattctggttgtatagcgtttatttcacatcatatgtaaaaaacactaattccttatgtacgagaatcattataccatcaagtttcgacaaattagcgataaattttattacatttatgtttcaaacagatgtcaagtcacacatcatttgtcatttttcttaagcgtgcaaaaaaactgtcgatattattttttaaatataatctatcaaacaaaaaagagtcgattaaataaatcgactctttaaaatttactattctagaatatcatcaatatatttcatatatttcgtcaacgttgccggagagatgccgaatcgggccgctgtgtcttttttcgtgtcttgcttgccatgggcttctttccaaatataacagatggctgctgcccagcctttctcattcttcaacggagcagctgcacgaatttgctggatgacatggaaaacccagcagctcatgacttctgttttcatctcttctttttcagcttgctctaatagtttgaccgtttgataggcgaaaagtgcatcctctgaaacgtcagcagccgcggaatctccattcagaagcagctttacaaaatgattttcaaaaggagcggtgattctctttgagcgtatcaccgcttcaagatgctccgtttctccctttgtgctgctgatataataggctgcgagacgctgttccacagatgaaggaagagcttccctccgctcaatccaaggcgccgggcggtcttcgccgggatattgcgactcgacttttctccagatcgtctcggcaaagtcggtatgtcccgtaaaataagcagagcaggaaagccagtaaaagaaggtgtcgtcaccttcaaagccggttttatataatgatttgagccatttatatccgatctcgtagcggccgacaagcgccaaagtagcacccaatttataacgctgctccattagcatcggatagacattggagagctgatcactcaattccaccactttttcgtcttctctttcataatagtagaaaacgagaagattgcataaggcgtgaagatttccttcattatgagaaagcacttcataagcggtttgcttcgcttttacaacgtttcctgaatagaaataggcaagcgcgagattgttgtatgctgaccaaagctccggatattcagctgtgatttcctcaagcgccgcaaccgcttcagcaagctggccgctttccagcaatgactttgcccgatcctgtttcaccagcagttcatcctgatcatacaacgaatcctcaatgccgtcgtctcctaaatcgagcaaatcaagcagactatcgttttcttcggcgaattcaccatccgggtccgcatcagaataagcggccgcttccttataagcttcctggaagagccccagatgggcaaagttattcgctttaaagtaatggcactccggcatttcggcctccagatttgccatgatatagtcaagaagatcgttcgactcttgatattggcccatttccgaataaatgaccgcaagctgtgaaagcatctctgaatcctccggctccaaatgaaccgcgcgctgaatcagtttgcttgcccgttttagattgcgctctttatacgctttcaagcctttatgaaaaaaatattgtccatcttgaagcagctggacaatttgtgcgtgatttttatgttcagaagtgtgttttcccacaactaccctccgttttatacaatattaccgtcagtagtataccataaatcgtaagcccctcaatagttcaaaaggaaggattgggaaaatccctcctcttttttattggctgattcgaccagaatttacccggctttgttttctaagtccgcattcattttcagctgctgttcagcaaaatccctataaagaccatgggaagccattaactcatggtgtgttccacgaccggtaatttcccctttttcaacaaacaaaagctggtccgcatctacaacggtagataggcggtgagcgatcacaatcgttgtgcggccctccatcagcacctcaagcgcctgctgaactgatttttcagattggctgtcgagacttgaggtcgcttcatcgagcataagaatgcttgggttacggagaagcgctctcgcaattgcgattctctgcctttgtccgcctgacagcataatgccgcgttcgcctacttctgtatcaaactgattcggcagctcctttataaaattgagcgcatatgccatctccgcggctttttcgatctcagcatccgtcacatctcgttctaacccgtagcaaatattttctctgattgacccggacattaacgggctttcctgcgatacatacccgatatgctccctccacgattcaagcgagtaagtatcgaccggctcgtcccccagtcgaatggtccctgcagtcggagtataaaaacgttcaagcagcttaaacagcgtcgttttccccccgccgctcggaccgacaatagctgtgactttacctgcttcaatgacggcgctgatttcttttaaaatcagctgatcaggcttgtatccaaaagacacgcgatcaagctgaatagggagatgcgcattttcaatttgttttcctgtcactgtatcttcttcttcctctgctaaaatctcaatcattcgttctgttgcaccgattgatttttgcagctgtgtgaaaaacgttgtaatctggcccatcggcattataatttgaaacaaatataaaataaaagccacgagcgctcccgccgtgagttcgcctgaagatacctgcatgccgccatatccgatcactgcgacaagcgctgccattagcacgagtgagataagcggaccgacaagtgattgaaccttagcttctcgaacgccaagcttaaataatgatgaaatccctgttttcccgcggccgtattcgacatcctccgcatttgaagctttgacaagtctgatttccgggagaatttgattcagcaggcctgtaaaacgggctgtttcatcttgtgtttcccgtgaaatggagaacattttccgtccaatcggcaccaaaataagagcggccagcggaacgaccactaacacaagcagtgtcagcttccagttcataataaacaagattgtcaatgatccaatgacagaaatgatgcctgtaataaatccgctgatatgggttgtaatcaattctttgaccaccatcgtatcgttcgttacacggctgactgtttctccggaagcatttgtatcgaaataagagacaggcagcttaattaatttcttccataataactcccgcagcccggaaatgattttttgtccattatagttaagcgcataggtggcataagcgcttaaacccgcctgaacgaaaaacaccagcgcgatcaaaccgatttgcgtgcctgacagatttgacatagaaaaaccatcgacaagctgcttcgttaataatggaatgagcaggctgaccagcgtggttactacactgagggcaagcgcaaaggcgagctttccataagaaggattggtccgtcttactaaggcaaaaaagggtttcaatttacttttagatttttgtttcttggttggcatatattttcctcctgtttcagcgttcagaaaggtgaaaagtcatagcaaaaggatgatttttactctttctcaatcatatcaatggagaaagactttttcagtatatttttgccgtgatcaaaataaaaatctcccactcattgtttgaataggagatttttgtgttagacatctttcactggcttcttttttctgtaagtcaatgttacatcctgctgtcgcaggtcttctattatcattttgtaccgatcaacttttgcggtatgttcttcttttatcatctgaagggcagcttttcgtttttcgctattagactcaagctctttttttattttttttacaatcaaccctttttgccctttgatttcctcttttaatgaagactcaaatttctttgtcaggctgagaaagtcgttgatcggttgattgagggtgcccgctttccccttcatttcatcttgggtaagaaacatataggtcgttgatacaatttctgtttcactttctgaaaataaggaagtcactcttcatattcctcctaagactgaaaatcaaataactgagaaatcatttcttctttttcaaacagcttttcaatactctcgcggatatttttgataaaatctcttttttctgttgtctgtttttttaattcagcaacaattccatcattagcaggaagcgcacctgtgtggaatgattcatgaactgagattttctccaatttatcgaatgtgtggctgaaaccagctgcaagccggaattgaagatcgaaggcataatgcgaagggttttcttccatatgatgaatagccgtgatgatcgcctgctttttgtctatgaagtcttcatcgatttcctgactgtaaaccttctggtacttagaaatcgcatcttccatatcttcaacgattttcataccgttttgatagattctgacagcggatgagagattgacttgaatcgtttctcccgagccactcttccctgtaaaataaatatcggagcctttatagctgaagcctttttcctttgacaaggcgttgagcatttgaacgatgctgtggccgtcgacgataagttttagtgcgtcttttgtttctgtgtcgagtgttttcaatgaggacagaattgattttacatagtccactatttcaccaacgtcttttaaagcttgcataaattggccatattttagatggtctatgaaatgttcgtaccgtgactctatgcctcgcatactcgcattaatattcgttaattcttttttgatgactttcttttgcgtttcatcaatataaccattttcagctaactgatctacgaccggtccgctgtttctcaacaaggtatgaagaaaacctaaaaacgacggcagttcctcttttattcggccatacatttgcttaacatcatcaaaatgctcatataggacacttactttctttaaagcgccgtctgtgtttttcactttttcaatcaggtctatgtctatcccgctggctgcctttataaaaccgttcaagccgtctttttcatagtcatccttatatttttgaaggaatttttgaattgacctcacatcttcgtcaggaaccccatccataatgtttcggatgccttttacacttgtatttgtatctgccatcttcacatcaccgaatgtaataaaatcggccttgccgctgactccatacagcgggtcatcttttgagatgcgctgagtgatgtttgttgttacgcctttgtcttcataatatttttggatttctttttttaacttttctggcgggatggaatctatatcttcatatttataactaaatttcctaataacatatctatataaactttcatcagtttcaagtaattgatcaatattgacttgagctccatttaccccataaacttcatcatattctccatcaatcaattgcaccataacttggttattatttgcaagtgaatgtcctaaggcgaatgtttttaaatcctcagagttacctgctgctttctttgctttgttagtaaactcctttgtagcctcatactgactatgatcaattcctaaaaaaagaccaaaaaagttatatgaccaatccttattatcggcactaccttctgaaataatctgaagctgatcaatatgttttttctcatctattatatggattgccgttccatcgtaacctgattctctggtcgaactttgtatacttgtattctgatttacaagttcattggaggtgtaaatttcaattttcatattctcaggaagatcgtggtgggtttcctctttataaattctgcgtatatctgcttcgaaatccttcttagctttcttaacttcactcgcaatagttgaggcaaacttttgtttatagtcatattctaaatcaattaaccttaactttacgttctcattctcaaatacatttttatttcccatcttatttctcctttttatctattaaaaaggtgatagaattaattaatttctcaactttatttttagccttttcttcatctaaggagcatggttgattttcatttttgcatccaagggtaaaggcgtattctactcctaggttatcttcctctgtagacttaacatatccaaaataactgtatgaataattatattttctatcaatatcgtcaaagatgtcttttttcttggcagtgtaaatatccgttttctttttgctgctttttttgtattcgcctttataatcattttttccactaacaatatctagcattgtcttaggttcattcgcaaaactttcttctttgtaatatgttacatggccatcaaacattacattggtgtctttatcataactattaaatccaatactttctttgtttttcccggttaacgatgatcttcttgatagatactttccatcctccggaaacaacatcctaaaccctttcagcttagattccagcaaataatatcctggttcctcttcttttgttgacaccatgtactctctcgttttctcgtcctgaaacgcaggtacttgaggcagatccttgggatccatgtcttttggttttaccgcttctgttttattgtcatttgtgctgtttttatcattgtcattcatactgcatcctcctgtcagggcaagtaataagctgaagcaaataaagatgatctttttcattacgaacctccacgggttttgtgagaatagtattctatttttatatcaaaaataattctattgacctggttaagagatgattatttcatcctttttcatgttacatcatggcggaatttggataaataggaaatgagactcggttttgatctccttttattaactaatcatatataacacccaatataaatctaaatacctattacttttttcacaaaacaaaaagagccgtatcatccggctctttactcttcaatctcagaatggcgttttttcaatacgtcaagcacatcatccagcggcagggattgttctctgagcaggacaagcaggtgatacagcaggtctgccgcttcccatttgagttcctcatgatcccggtttttcgcggcgatgatgacttcggatgcttcttctccgacttttttcaaaatcttatcgacgccttcacggaagaggtacgtggtgtaagctccttcaggcatttccgcttggcgttccgcgatcacccgctccagttcgttcatgatgccgaatcggtccgcggcctgttcttctgtttgttcctttgtaaaacagctgtagctgccagtgtggcatgccgggcctgacggttctacgagtacgagcagcgcgtcttgatcgcagtcataccggatacctttgacggcttgcgtgttccctgaggtttctcctttatgccataacgcttggcgtgagcggctgtaaaaccatgtttccttcgtttccagcgttttttcgtacgattccttgttcatatacgcaagtgtcagcacttctttgcttgccgcatcctgcacgatagcaggaattaatccgtcctcgttaaaacgcagttcatctgcctgtttcatctcacattcaccccgtactctttcaagtatgatttcacttctttaatcgatgtttctttataatgaaaaattgaggcggccagcgcggcgtcggcttctccttttgtaaaagcctcaagcatatgctgtgcgtttcccgcgcctcccgaagcgataacagggacggggacagcttcggaaacaagctttgtcagcgtgtggtcgaaaccttttttctcaccgtcggagtccatgcttgtcagcaatatttctcctgccccgcgtttgacgccttcttttgcccacgcggtgacctcccaatctgttttctttctgccgccgtgcgtatagaccttatatgtgtcagattctttgtcatacttggcatcaatggcaagaacgatgcattgcgaaccgaaaaactcggctccttctgcaatcagctcagggcggagaacagctgccgtgttcaccgacactttgtccgctccggcacgcagtatcgttttcatatcactgagctgattgatgccgccgccgactgtaaacggaatggcaagcttcgcggcaacctgctccacaacgtcaaccatcgttttgcgtccttcatgcgaggcagaaatatcaagaaaaacgagttcatccgcgccttcccggtcgtacacttccgccagttcaactgggtcaccggcatccttcaattcgagaaattgaattcctttgacaacgcgtccttctttgacatcaaggcatggaataatccgttttgtgatcatttgcgcttcaccctttcaagcgcctcacacagcgtaaactgattggtatacagcgcttttccgatgatcgctccagagacgccgtccgcctcagagcgggcgagagcttcgagatccgcgacggagctgactccgccggaagcgatcaccgatttccccgtttccttagcaagctcgaccgtgcttttaacattggggcctgacagcattccgtctgtcgcgatgtcagtaaaaataaagacttccgcaccttcattggctagctctttgcccagttcagttgccttaagggttgatgtttccagccatccctctgttgaaacaaaaccgtttctcgcatccagtccgattgcaattttctcgccatattgtttcagcatttttttgacaaacggagggttagaaactgctgagcttcccaggatcacccgatcgactcctgctgataaatattcatagacgtcattttcggaacggatcccgccaccgatttcgactttcaggttcagcttttgcgtaatctcaatcacatggcggtcattcactcttttcccttctttggccccgtcgagatcaacgagatggatccattcggcaccctctttcgcaaataactcagccatgtcgtacggtgaatcgccatatatcgtttccttattataatccccttgaacaaggcggacacatttgccgtttctcatatcaattgccggatataatgtaaaagcactcattttttcaccttctgttctgctgccattttcgtaaattgagttaaaatagacattccgaccgtgctgcttttttccggatgaaattgggcgccgaagacgtttctttttccgactacagcaggcactcgtacaccataatcggcgcttgccagaagcgcgttctcctccatcccgtcaatgtaataggaatgaacgaagtaagcgtagccttgttctgtttcagacagcagcggagattcgttatgaaaggaaaggaggttccagcccatatgcggaaccttcagcttgtttcctttttcatcttctgctttcagcctgactgcttttccttttaacagcccgagtcctgaagcggtgccgttttcttcgctttcttcaaataaaagctgcatgccgaggcagatcccgagaagcagccttccctctgagaccatatcgtgaatcaattgatcaagcttcgtgtagcgcaaattgtccatcgcgtctccaaatgaaccaactcccggcaaaatgaaggcatcagcttctttcagctcctccggcttttcagaaacaaaatacggcacgccgacacgttcaagcgcctttgagacactgtataaattccccattccgtaatctatcacgccgatcatttacagcatccctttcgttgacggtattcctttaactcgcggatcgatcgttgtcgcttcatcaagcgcacgtcccagtgctttaaaaacggcttcaatcatgtggtgggtgtttgtgccataatgaacgatgacgtgcaggttcattcgagcttcgagcgccagcttccacaaaaattcatgtacaagctccgtatcgaaagttccgactttagcagccgggaaatcagcgcgcatttctaagtgcggccggttgcttaaatcaatcacaacttgagcaagtgcctcatccatcggcacaaacgccgatccgtagcgtttgattccttttttatcgcccaacgctttgagcagcgcctgccctaagcagatgccgatatcttcagtcgtgtggtgatcatctatatcaacatcgccttttgcgttaatggaaagatcgaattggccgtgtttcgtgaataaatccaacatatgtgtcataaacggcacatctgttttgatatccgcttgtcccccgccgtctattgtaaatgccagttcaatatctgtttcgtttgttttcctgacgcgttccgcttttctcatttagaaatcctccgttctctcgcttcaattgatctggcatgggcttctaacccttccagtctggcaaaagccgcgatgctttcggcatgttcttcaaaggctgattgactgtaagaaataatgctcgatttcttttgaaaatcagttacgtttaatggacttgaaaatctggctgttccgtttgtcggaagcacatggttcggtccggcaaaataatcaccgacaggctcagggctgtatctgcctaagaaaattgcacccgcatgtttgatactgccaagcaaagcttccggagactgtgttatgatttctaaatgctctggcgcgagtgtattgacagtattaatcgcttccaccattgtttccgccacatatatacaaccgtaatctctcactgaagcttccgctatttctcttcgcggcaaggttttcagctgcttactcacctcggctgaaaccgcctcggccagcgccatggaatctgtgacaaacacacatgagctgagcttatcgtgttccgcctgtgacagcagatcggctgcaatttcgctcggaatcgctgtttcatcagccagcacgacgatttcactaggtccggcaatcatatcgatatcgacatcgccgaacacttctcgtttggcaagcgcgacataaatgttgcccggacccgtgattttatccaccggttcaatggtttctgttccgtatgctaacgccgcaatcgcctgagcgccgcccattttgtaaatatcttttatgcccagctcggctgcagcaaccaaaactccaggagacagcagaccgtctttttccggaggcgtgacgagaacgattctttcaacgcccgctacgagcgccggaatcacattcatcaaaacagatgaagggtatgcggccgttccccccggcacatatacaccggcggaatccagcgccgtcactttctgccccagcattgtgccgtcctttctgtgataaaaccaggaggattgcagctgtctttcgtgatattccctaatattttcgattgcctgcctaatcacctgaagaagacgtgaatccagtgaggtgtatgcctcctcaaattcttcttttgtgaccagcggactgtctatttcgatgccgtcaaatttcgccgtgtagctgcgaaccgcctgatcaccgtttgctttaacatcttctataatggaccggaccgtctttctttgctcttccgttccggcatcgatggaacgcttgagagaaagccgttccgctccgctgatggttttgatcttcattttgccgtctctccttccacaacgagagataggcgggatgccatttcgtcaatcacatcgtctttcatgcgatagcttaccgggttgacaataaagcgagaggtaatgtcacaaatgtgctccgtttcaacaagcccattttctttcagcgtctgtcctgtggaaacaatgtccactatccgatctgcaagcccaatgagcggagccagttcaattgaaccgttgagcttaataatctcgacttgttctccctgctctctgaaataactggaagccacattcggatactttgtcgcgattcttggcgctactccgctccagtctgtattcggaagtccggcgacagctaagtggcatttgctgatttttaaatccagtacctcatacacgtcgcgttcctcctccagcatgacatccttgcccgcaattccgacgtctgccacgccatgctccacatacgtagttacgtccatcggcttcgctaatatgaaacgaagattttcctccggcacatcgatgatcagttttctcgaatcttcaaactcctcagggagcctgtagcctgcctgcctcagcagccctgccgcttcttcaaatatccggccctttggcatcgccattgtgagtaacttacccattttgctcttcctttctggcaccgataaaataagtgacgtttgcaaaagattttgtcatctggtcgatattttctattcccgataaatcttgaagaaccactttgttccctttcatgcgttcttcattcgcataagcgatggcttgcgcccgctgctctttgctgaaaataacagcgtctatatcacaaggttcttctttcatatgaagggcttcaatcagccggtcgatccgaagcccgaagcctgttgccggtgcaggtgaatcaaaatggcccagcagcttgttgtaacggccgccgcttccaatgacaaaaccgacattctcggcgtacacttcaaataaaatccctgtgtaatagctcatgtggctgaccatattcagatccaggcggacattttccgtacatccgtaatcctcaagaatgtcccacagcgccttcagctcatcaaccacgctttttccttgcgcagaatcgacgatttcctcggcacgtccgcatacttctataccgccccgcagttcaaggagctcaagcagcctgcttttatcaatggaggaaagcgggagagacttgacatgctctctgtaaccgacgtagttcttttcatataagaacctccgcagcacatcagctcgttcaacgttcccgagcacctcaacaaacaaagcatccgcaatgccggcatggccaatggcaattttaaaggatgccagcccagcgtttttcaatgccccgacgactaaagcaatgacctccgcatccgcgctcgttgtgccgtcaccgattaactccactccgacctgctcgaactcagccggacgtccgccttcacgctcctgagccctgaatacatttgccgcatagccgactcttagcggatgaccgtgtttcagaagcttcgatgccgccacccttgcaatcggccccgtcatatccgggcgaagcaccaatgtcttgccgtcctgatcaagtagcttaaacagctgctgctcttcaattgctgactggacgccaaccgtatcgtaaaactccagtgtcggcgtttccataaattgatatccccatttatcaatcaaatcggttaacgatcgtctcaccttttttttcgtttcgtataaaccgggcagtgtatctctcatgccgtgcggtttttcaaacataaacatcaacccgagcacctccgctgttatcttatgaaggaaaattccgaatcctttagttcgctaatatgataatatgttagcagatgaaagaatgaaaatcaacgcttaacttcagtaaggatatttttagttcaaatatccttctcctcattatgaaaaaatcatgaataatgtattaaaggtacgtaatatctcaaattctttatgtttggcatgctataatacaaatcaaatagagaacaaggagataaagatgaaaacactgcgaactctatgtgtcctgatgattctttcaggcgttatttttttcggacttaaaatagatgcaaaagatatagatattccttttttgaacagccttaaaaaagtggtttctgatagcgatacagatacaggtgcgaatagcaaaaaggagctgaagggaagcgcaaaaccgctggatgtcatcctttacaatcaaatggacgcaccccggctctataacggctgtgaagtaacaagccttgcgatggtgctgaattacgcaggatacgacgtgacaaaaaacaccctggcaaatcaggttgccacagtgcctttgacatacagcagcggattaaagggtgatccgaatgacggatttgtcggggatatggcgaatggccctggtctcggtgtctaccatcgaccgatctatcagctggcgaaaacctatgcgggagacaaagtgtctgatctgactggaaaaagcatttctgctgtttatgaacagcttgaaaaaggcaatccagtttgggttattacgacagccaactttacgccagttgacaacatgcagacatggaaaacaccaaacggaacgatagagattacgtacagcgaacacagcgtcgccgttacgggatatgatgataaatatgtgtatctcaatgatccgtatggctataaaaacagaaaaaccgatagaacaagctttgaaaaagcgtggaaacaaatgggcagccaggccatagttattcaaaagtaaacgcctgaaagccgcactatgctctatcctgagcaaatacgacaatattcatgctttttgtttcaatcggtaagatcgattcattttccatttatcatccagaattatctttactttcaggctgtctgtttttatgattaaagcagattcagccttgccccgatctatgtgagagaagccggtgcaagtcgctgacgcttctcttgcaaaaaatgaaagatatccggggaggatttatcattgaaaaaattcgtgtctatcctatttatgttcggtttggttatggggttcagccagtttcagtcatcaaccgcttttgcagcagacaaagtggtgcacgaaacaattatcgtaccaaaaaatacaacatatgacgggaaaggacagcggtttgtggcagggaaagaattaggcgacggaagccagtcagaaaaccaagaccctgtttttcgtgtggaggatggtgcaaccctgaaaaatgtggtgcttggcgcccctgccgctgatggagtacacacttatggaaacgttaacattcagaatgtgaaatgggaagatgttggtgaggatgcgttaacggtgaagaaggaaggaaaagtgacgatcgacggcggttctgctcaaaaagcgtcagataagatattccaaatcaataaagccagtacattcacagtgaaaaacttcacggcggacaatggcggaaagttcataagacagcttggcggttcaaccttccacgttgatgtgatcatcgataagtgcaccatcacaaacatgaaggaagcgatattccggacggacagcaaaacaagcacggtcagaatgacaaatacacgctactctaatgtcggtcaaaaatggattggtgttcagcatatttacgaaaacaacaacactcaattttaaccaaaaaagtccgctgatgttattcagcggactttttcaatctttcttgcatttcttccttcgtatagatgatcctcatcggatttccgccgacaaatgcgccggcaggcacgtctttatggacaagtgttccggcggacacaactgcgccatctcctattttcaccccgggcagaatggtcgtgttggcaccaatcatcacttcgtctccgatcagaactgtgccgatccggtattcgtgaatcaaatactcatgggccagaatggtcgtattgtacccgatgattgtatttgttccgactgagatcttttccggaaacatgatatctggcatcaccatgagggcaaaggatgtctgatttccaaccttcatccgcagaaatgtacggtacagccagtttttcatccctataaacggcgtatatctcgcaatttgaatgacaatgaaatttttgacgacctttaaaaaaggtaccgtttgatagacatgccacagtgagttggcccccgagaccggatgacgatctgtttttctcacagattacttcactccaacgatttgtaatagatcactcattttctcaagcataaaatcaggctcatgcttcgccagcatttccggccctttaatcgtccatgcgactcctgccgtttttgtaccggcgtttttgcctgccagcacatcgtggtaattatctccgaccataatggcttcctcgggcttgcttcctaactgtttcagcgctaacagcacaggctcgggatcaggctttgcatttgtcacatcatcaagggtgacaactgtttcaaagaattcgccgattcccgtgagcttgaggcccatattgacagtatctcttaattttgttgtcacaattcctaatgtaaagccggctttttttaatgcatccagggtctcatataccgtttcatattcagtcacgagtgaatcatgcatgtcatgattgtacgctctgtacatagcgatcatatcctcgcatttatcagggtccatcgaagagaacgtttcaaaaagagacggcccgataaatgcaaggacatcttctcgtttatacttgctcggataataatgctccagtgtatgcaaaaaggacgcgataattaattcattcgtattaataagcgttccgtctaaatcaaacagaatcgtcgttacttgtttgtcactcatattgcttcctttccaaccgctgagggtttccattttttccacgtgtgcgcaatagccattgtcagcagaactgctgtggtgacacgaatcaaaagaagcggccagactggtatgccgagcggaataaagacaagtgtatcttccacgaccgcgtggcaggcaacgagaaatataaatgccaatgtcatatcccgcttgctcacgccgtcatcctcgacagctttgatcatgacacccgctccgtaggccagaccaatcgtcagtcccgccaccatcgtcatagacgtatttttattcatgccaagcagctgcgtaaacggcgacagccacctggaaaaccgatgcagccagcctaaatctcttaaaaactggatgataatcatcagcgggatcactattgccgccagctgcaaaacaccaagtccggctttcgttaatgcttctgccaacattcctagccagctgtctggcgccgcgctcttcgcagcgataaaaccgtactgcgccgtttcctttccgccatgccaaatgaggttgatgacgatggctgacacagcggccaaaccgatgcgcacggccaatatgacgccaattctgataccaacctttgcggcaactgtcgattcgataatcaagttatgacagaaagaaagcataacagctaaaataaagacttctttcacagataaatccaatgttaaaatcccggcaattcccgcatacagattcagcatatttcccagtacaagcggaatggccgcttcaccagaaagcccgaagagacccattaccggtgtgatcagccgtacaagccaatccatgacaggggtatgctgaagcaaagtgaccaatagcgttaccgggaaaatcactttacccagcgtccatgttgtttgaaaacctgctgcaagaccggccagaaagatcttcttcatccctcatcccctttgttgacgtctactccgcgtaccgctccttcgaatatcccttgacgcgtctgaagatgatggctgccacagccaaaacaatcaatacgattgaaatcacctgagcgatgcgaagtgaatcagtcagcattaagctgtcagtccgcattccttcaataaagtatcttccgattgaataccaaatgatatagatcaagaacatctcgcctctacgcaaattcactctgcgcagcagcagtaaaacaatgacgccgacaaagctccatagtgattcatataaaaaagtaggatgataatattgcccattgatatacatttgattgatgataaattcaggcaggtgcaggttttctaaaaaggctctgctgacagcctcgccgtgcgcttcctgattcatgaagttcccccagcgcccgatcgcctggccgagcaaaatgctgggcgcggcaatgtccgcaagcttccagaacgaaagttttttcactctcgaaaacacataacccgttaaaatggcgccgattaatccgccatgaatggcaatgccgcccttccaaatcttaatgatttctcccggatgtgccgcataatagtcccattcaaaggcaacgtaataaattcgcgcgcaaataatcgcaattggaatggcaaacaggacaagatcaataaacgtatctttctgcagcccccgtttttcactttccctcatcgcaatccacagcccgagcaaagcaccgagaccgataatgattccgtaccaatggacggctaacggccccagctgaaatgctatcggattgagtggttctatcgcttcattcatttaacgccaactcctattcttcttgttcaccgtcttcaatgacgtccgccagcttgttggtaaattgttcagcggcattcagccccatccgcttcaatctgaagttcattgctgccacttcgatgatgactgcaagatttcggcctgggcggacgggaatcgtcagttttgtaatttctgtatcaatgattttcatggtctcttcctcaagtccgagccggtcgtattgcttgccctgctcccagagttcaagattcatgacaatcgtgattcgtttattgcttctgaccgcgccagcgccaaatagcgtcatcacattgataatgccaaggcccctgatctcaagaaggtgctcaattaattccggagcgtttcccacaagagtatcctgatcctcctgccgtatttcaacgcaatcatcggcaacaaggcgatgccctcttttcacaagctccagcgctgtttcgctttttccgacgccgctctttcctgtgatcagcacgccgacaccatatatatcgactagaacgccatgaattgctgtggtaggcgccagcctgctctcaaggaagttggttaaacggcttgacagtcttgtcgttttcagcggcgatctgaggacaggcaccccatttttctcggaggcgtcaatcagctcctgcgggatgggcatatctctagaaagaataatagctggtgttacatcagtgcacagagaatccattcgctgttttttctcctcttcaggaagctgttcaaagaaagaaagctctgtttttccgagaagctgcacgcgctctctcgggtaatatgtaaaatatccggcaatttcaatgcctggtcttgataggtcactcattgtaatcgggcggttaattccttcttctccgctgattaattccaaattgaactgttccattacgtcttttgtgcgaacctttgccacgatatgttcctcctgttccgggctgccccgagcttgctcacaatactttcattttatcactttcaggcttgaacctaaaacagattttataaaaggcgggaaaacacctcagctggtctagatcactagtctgaaaaagagtaaaataaaggtattcaaattccagaaaggcggatcatctatggcagagagtcttcttatcaaagacattgcgatcgtgacagaaaatgaagtaatcaaaaacggctatgtcggaatcaatgacggaaaaatcagcacagtctcaacagaacggcccaaggagtcatattcaaaagaaattcaagcacctgcgaattccgttttgcttcccggcatgattgacattcatatccacggcggctatggtgcagatacgatggatgcaagcttttctgcgctcgacatcatgtcgtcaagactgcccgaagaaggcacgacgagctttttagccacaacgattacccaagagcatgggaacatttctcaagctttggtgaacgcaagagagtggaaagcggctgaagagtcctctttattaggtgcagaactgctcggcattcatttagagggcccctttgtttcgcttaaaagagccggagcgcagccaaaggagtggattaggccttcggatgttgcgcttttcaaaaagtggcagcaggaggcaggcggactgatcaaaattgttacacttgcgccggaggaggatcagcattttgaactgatccgccatttgaaagacgaatcgattatcgcatccatggggcacacggatgccgattccgcattgctgtcggatgccgcaaaagcaggggcgagccatatgacccatctgtacaacgcgatgagcccgtttcatcaccgagagcccggagtgatcggaacggcgctggcccatgatgggtttgtgacagagcttatcgccgatagcattcactcccaccctttagctgcaaagcttgcttttttggcgaaaggcagcagcaagctcattttaattaccgattccatgagggcaaaaggcctgaaagacggcgtatatgagttcggcggccaaagtgtgacggtaagaggacgaacagctcttctttcagacggaacccttgccggttcgatcctcaaaatgaacgaaggcgcacggcatatgcgtgagtttacaaattgctcttggacggatatagctaatataacttctgcaaacgcggccaaacagctgggcatctttgaccgaaaaggcagtgtgactgtgggaaaagatgcagatttggtgattgtcagcagtgattgcgaggtgattctcaccatttgccgcggaaacattgcatttatatccaaggaggctgaccagatatgaaagtaatggaatgtcaaacgtatgaagagctaagccaaaaagcagccagaataacggcagatacaatcaaagaaaaacctgatgccgttctcgggttagcgacgggcggcacaccggaaggcacttatcgcgagctgatccgcctgcaccaaactgagaatctctcatttcaaaacgtcactacagttaatttggatgagtacgccagactttcaagcaatgacccgaacagctatcacttctatatgaatgaccgtttatttcagcatatcgacagcaagcctagccggcattttattccgaatggaaatgcagacgatttggaagccgaatgcagacggtatgaacagctagtcgagtccctcggcggcactgacattcagcttctcggcatcggccgaaacggacacatcggctttaacgaaccgggaacctctttcaagtcgcgaactcatgttgtgacattaaatgagcaaacccgccaagcgaatgccagatattttccttccatagacagcgttccgaaaaaagcactgacaatgggaattcgaacgattctctcaagcaaacgcattctgctgctcatttctggaaaaagcaaagcggaagctgttcgtaagctgttagaaggaaacataagcgaagattttcccgcatctgctttgcacctgcattccgatgttacggttttgattgatcgtgaagccgagtcattaagaccttgaaaggaacatgctgacttatgaatatcaataaacaatcgcctattccgatttactatcagattatggagcaattaaaaacccaaattaagaacggagagctgcagccggatatgcctcttccttccgagcgcgaatatgccgaacaattcgggatcagccggatgacagttcgccaggcgctttctaatttagttaatgaaggcttgctctatcgcctgaaaggacggggcacctttgtcagcaagccaaaaatggaacaagcacttcaagggctgacaagctttaccgaggatatgaaaagccgcgggatgacaccgggcagcaggctcattgattatcagcttattgattcaactgaggagctcgcggctatattaggctgcgggcacccctcctctatccataaaatcactcgggtgcggctggcaaatgatattccaatggcgattgagtcctcacatattccgtttgagcttgcgggtgaattgaacgaatcgcattttcagtcgtcgatctatgatcatattgaaaggtacaacagcataccgatttcccgtgcaaaacaggagcttgagccaagcgctgccaccacggaagaagcgaacattcttggtattcaaaagggagcgccggtcctattaatcaaacgaacaacatatctgcagaacggaacttcttttgagcatgcaaaatctgtatacagaggcgaccgttatacatttgtccactatatggatcgtctttcataaaaaaaaagcctccaaccctttttaaggattggagacatggcgaaaatcaaactggtctggtgctggacgatatgtctcttttttcgtcttgaacttccagatcggtgatttcgttttgccattaaaactgtcttccactataatgtaccaataataaacagactgcggttcaagatgatcccagcggaattcagctgtatccccgctcttcacttgctcccgttttccgagctcttcattggtatatacgttacattcaaaataatcggtttccacctttttgattcttggcttcaaatcaagcgaaagggaaaattcatccttgttgccataggtatccgtatcatagtaattcttatcctttacatacggagaatacgtcgatacgtgcaccatgtcattggcctggtcaaattgaagcaaacgcaaatacccttgaccgccttctggcccgccctgataatcggccagcatttgatgcacaagacgatccggcttcccatcaccatcatcatccagctcatctgtttttctcatcgcactatgataatgcccgctcaataccatcacgacattcgggttcggctttacgatttctttgaatattttctctccgattgggcttctgtttccgctgaccagcaaatactcatgaaaagctaaaatggccatccggtcagggtgtttcttcagcacctgattcatccacgcgatgtcttcatccgtaatgccccatcccatgtacagcatgatataatcattgccgttgctagaaatcaggtcataatgtccgcggttatttttataggaaccgccataatgcaattttttatcaaaacgatcgctgccaaaatatttgccaaacaccctgtaggagccgtccttatgtccgacatcgtgattgccggccagcactccgtaaggaattccgctcttatccagaacggacattgaccgatcagcgtttttccactgtctgatatcggcggaatcatctacaatatcacccgtgtggaacacatatttgatattgagctgcttttgattatcttttatccattcggtctgtttatcaaaaatatgcggatagctttcggcgtaatactgtgtatcagacatccagacaaatgtgtacatatccttcgcaggaggaatttcatcctgtacaatcacattcattttcgactcccgtacaaaatcggcggcaatcacagacgctttcagcgtaaacggtttgtcatccttcgcgacgaagctgtcaacaggctgccattcgtttgtccgataattccaagcatacatcgtcacctttctccccggcaaagaactgcccttccagaccgcttctgccagatcattctcatcaattgatggatcaaccgtcacttcaaagcgatgataagggaaaagctctttgttttctgtcgatactgtttttccatcagcagctgatacccgctccaattctttattcgtaaatggggtctccctttccggcacaaagcttttcggcggttcagtcagtgacgcgtgcttaaatattttcacatgattgcgcgctgtatattgaaatcccctataaaaaccaacatccatggcgtcattcgtcggatctttcacccgtacagaaagcttggccttatgcgtgtcggcttcgctgtctataacctccggctggtccggatgctctcgttcggttttaaatatcctctcaatcactgttttattgcccgcgagatccgttgctgtcacttttagagaatgttttcccggcaaaaggtcagaagatgatgtatgatatgggagtgtaatgctttctccatctaaagacgcttccgcttcctcaattttgctccatttatcatacatatccgcctgcaggataaggtttcctttatacgtttgcccctcggtgatattcggctcaatgtgaggtcctgaattatctacccgtacaaccaggctgacattttccttgccgtcgcttgcttgaatatggtgagcgccttcagaaagctttgatgtatcccactccagcagctgtgatgtaaatagtccgtcaggcagattgaactgaaattgccagcttttattcgagcgctgattatcgccaataaagagttccttctcaggagacaccctctgatctctgatcaccgttccatccgataacaccaatcgggcgtttttgactaagaagtcatcacggttttcagccgtatcaaacggagacaccttcgaacctgaacgtatcgtaatacgctgcagctgcttccctttccgaagcagtgtctctggcaatggaacagaataggtgcggtatttatttgttgtatcatcgaacaccttcagcactttgccttccatcgttaccgcgtttttaaaataaaggttcgttttcctcgtatcgaatgcaaaatatacttctttttccatcgcgggctctgtcacttgttttttcccgtcaatccacagcttaatgctgtcagctcgcccttctgtcgtggctttgagaaattgagttcccgacagcgtgtctctgttttcaatattcatccgcagaccgtgcgccttgcttgtttgtttaatatcaatcattttgaccggcgttctcgcttcattgatcccgtccccggccgccacataatactctagctgatccttcccgatcaattcaggcgaatacacaatataatggaagagattatcgttgcggtctttttcagcaagaattcgcttaaacggtttgttctcatccgtccggtagtaaaaggccgctgttttcactaggcttcggtcccgtatgtcagcccgcagctcaatgctttcagcagggcggacaggcttgcggtcagtccaatcctcaatgaccggcttttctttatcgagcttgattttccgtttctgctcgggcacctgtgcctgtaatacggttccgggagacggattcttttctccgattgaaatgttcagaagttctgcggttccgttcaacggatacttataaagcactgatgacagccggcgcagcgcatgtttccgataatgcgcaaccgaaatgtcctttcctgtattcgttgatatcacaacggcccgcggcctcgtattggccataccctctgtctcgtctatcaccgcgagattttttccttccgttaattgtgtctggtaatatcgattgaaatcctccgccgtcaattctggatgcccggcaggcttcagccagacgacaaacgtttcgccggatggtatcaagatcctttcatcaggtctccaaatcagatcggagtcaggcccttcttttgggtagcggtaacggatatggtagtctttaaaatcaatcgttctgtcagtcgtattaaaaatctcaataaattcataaccgtctgcgcgtcctatattcttcgtatcaaccgccagctctgtgatcagaagctccggaatatgggcaaggtcagcctggtatccttcaagcttcagtttcttcgtctccgactcaacccgctgcttcccattcgacatcacaatgtaatactcaagctcgctgttccaaatcaaacgtttcggaatttgtgccaaaaacttgcggaccgctccgggggtcgggtccatcggcaccattttgtagcccagctcattactttgtttataaaaaagaaaggcggaaaatgcttgatacgaattatcgcgaacttgagcctcaatcattagattgcttctcatttcagctttcacatcaatttgaggaggattttcaagcaagggtatgtaatgaggcgtctgaaatggttcctgctgaacaacaggaaaagctttcgattcatgatggccgccagacaaaacggaaagaaaagacaataatatagaagcaataaccgtgtatttcctcatcaaagcacctcccttttcatgtattttgcgtctgaacagggaagcttatgagttcatttttgtgcataaagaacaaaaaaacgtctgtctcttgaaaattccactattacctagtaaactaaggatagttaaccagttaacaattaaatcagagaggcaaattgatggacaacagcattcatgatgaattatttcaagctatacaacaattcgcattaaaaagggataaacgcgtctggcaaaaggtgcagataccatccattggcatatcctcacaacatcacgatcacctcaaaaaagactggactttgacccagcttcacattgtttcctgcatacataccagccaaaatgtgaacaacagcttcttagcatcccgtttacacatctcaaaagccgctgtttcaaaagcggttcatgctttgttgaaacacaatatcattacagtgacaaaaaagcctggcaacaaaaaagaaattttttatacgctaactgatagcggcaaagaactggcggggttacatgaacggcttcatcaaaaagcaaaggagcaatacaaacagctcttcaatgaattttcaattgatgagttgaaaacagtgactgcgtttattaacttgtggatcaagcatatgtaaaaaagcctcacccgcacgggagagacctttccatattattaagccctgtcaaatacaatatgaagtgagacgggtccgcgtgtatacagaccggactcagcataacaaaaatcttcctctaatctgatattccgcatcttatccagcacaatattagctacaatttcgatttcggttttggcaaaagctgctcctacacagttatgaatgccggatccgaaagcgagatgccgggcggcgccgctaaaagcgctcttgatgccaagatcttcccgatgaatattaaacacgtcaggctgttcaaatgcttcagggtcccggttagccgcaccgatcatacaaaaaacaatcgtatcttttttgatttccataccgccgaccactgtatcttgggacagctgccgcggaatcagctgaaccggcggtttataacgcaatgtctccgcaatggctctcggaactaacgaacggtcagccaaaacatcattcatctgctcaggattgttgagcaaatggtagatcatcagtgccagcgtcttatcagccggttccgttgcggctaacagcacattaagaatcagtgcgagtatatccttgtccgacatcgccatgccttcatattcagaagtacataggatggaaattaaatctgatcccggattgacgcgacgttcttcaatgaccggcatcaagtattgggaaagctgttcgctgcaccataacgaatgtgcccgcgcttcaggagattgagagatactcgtgataaaatcggcaactccgctatgccactcagagattttttcatggtctcttttatccagcccgagcatgtccatcgtgacgcacaccgcaaacgtctttccaaaatcattgacgagatcaattttccctctttcaagataaggcgctaacaagttttctgcattttgtttaatcaatggagacagatgatccagtgcgtcaccgatgaagcttctcactacaattcttcttttggcagagtgttcttttccatgcatttgggccagcacagggcctcgcattactggttcggcacgctcaacaagtgatttcgtcgtgaaaatatccggatgctgaaggatatagcggacatcatgatagcggctgataaaataactgtctatcgactcttcataatgaaccggatcttcctcccgcagttgtgaaaaataagcatatggattgttttgaaattgatcagaaagcacactaaacaatttaatcgattggctcatgttttactccccctatcatccttcacatgtgatccgtttctcagaaagcatctgcgccatttcctgtacaatgagatacccgtgattcgaccgcatacaaatagaaaattcatggttactgatcttctcaccgagcttccacggacgatgataagcaaggagcgtctcttccacctctaaaatatccggagctccgataaaaaacggcagctcagctatgacatattccacagccaaattcagcatatcctcactgacttcttccatcatcaaactgacgccccgtgcacgcccgattatcgcttcacgagacatgtccaaacaagcatgtcgaaaatgaggctgctcaaaaaaagcatgttcaacttcttgtctcaacagctggtaggctttgttatccataaaatcagaaaatgtatgaatcgccttcggatccccgccatgagccacaagggctctttctgcaaatctcctgtttcgtgatacctctttccttacttttcgttcagcctttcctctcggagttccaagcgcttctagaagattagccgcctcatgccctgcaagtaaaactgaaacgcttttaaattgagctttcgcccatccaattaatctgtaaatataatcctctgaaaacctgctgttaaatgggctgatccccaccaaaacatgcctgcgccgttcaaatatttctctgcagttttctgttaatgcctcagcaataaaatgcacagaccttctttccgttaccattccggtcatctcattcacccctaaaacttatcccgctttaagtcatcaccctcaaatacaagatggaatagctagaacaactgaacaagacgaatggcaggcagcacttaaagtttccaaatgttttttaaaattttaattactatttccatttcacatatcatgataaatgtttactagtaaacattagtcattttatcccttttccttccaaacgtcaatatgatctgtgcccaaatatttgaaaataaatgtaaacatcacattttccacacactttttacacgcatattcagcatgacagatcaacaaatagtctaaacaccaacaattgacaacgaaaacaagaaaagataaaatgaaattgttcaccagtaaacaatttgttttattgtttcatcgtaaactattattactaagaaagaaggtagcctatgtctgatttgacaaaacagatgatatacgacatatacgtgagactgctgcaccttaatgaacaaaaagcgaatacttcacttcagcaattttttaaggaagccgcagaagaggatgtgattgatatccctaaaaacatgacaagcatacatgtcattgactgtatcggccaacatgaacccattaataatgccggaattgccagaaaaatgaacttatcgaaagcgaatgtaacgaaaatcagcacaaaactgatcaaggaagaattcattaacagctatcagctgacagataacaaaaaagaagtttattttaaattaacccgtaaaggcagacggattttcgacttacatgagaaactgcataaaaaaaaggagctggctttttaccaattcctcgattcattttcacaagaagaacaaaaggctgtattgaagtttctagagcagttgacgtcaacacttgaagcagaacaaaccgatgggactccggacaaacctgtaaagtaaacaaaaaggcggtgtacactttggctcatacaaaatcaaaggcagtattgatcttatacactgtttgcttcagtgcattttttgcatctttaagccagaacatttattcacctattcttccgatcattaaagaatcattccatgtttccacagctatggtgaacctgtcagtctcagtttttatgattgtgacagcaataatgcaaattatattaggagcgatcattgattttaaaggcgctcggatcgtcttgattaccggtattctggcaacggcagcagccagcatcggctgtgcggtgactactgactttactttgtttctgatattcagaatgatacaggcagccggttccgcagcactgcctcttattgctgccacaacgatcggacagctgtttacaggcaatgaacgcgggagtgcaatgggaacgtatcaaatgctcctgtctgtcgcaccggctattgccccagttctaggaggattcataggcggagcagccggatacgaagggattttttggatacttgcggccatctctatcgttttgctggtgacaaacagcatcacctttcctaaagattctccaactgaatctatgcagcaagccaaaggcaatgtgttcgctcattataaatcaatatttacaaatcgaacagggaacgtcattttgactttaagttttgttctctttttcatttattttgcagtaattgtctacctcccaatattgctgacagagcattaccatatagatgtgggtatagcaggactgttatatttgccgctggcgctgagcacgattgcaggtacgtttctgtttaaaagaatacaggcaaaaatcgggctgcacaccttgtttatcggaagcaatgtgattgccgcctgcagcatcattttatttgctgttacacattccgtttctctcgttctcatggctctgacgctggcactgtttggcatctcgatgggggttattcctcccttgtactctacaatgattactaatgaatttgagcacaacagagggagtgcaatcggaatgtttaactttatccgatatacaggcatggcagcaggtccgatggtatctgcctacttgctcacaatgatgccgtctgccatgtcctttagcctcctaggccttggatttgccgcattgagcttttgccttcttccgccaatgttttcgccgcagaagcgcacgaaacaaaaaaagcaccacatgtaaaaaagctgcctttgcgggcagctttttttatttttttctaagcggctctaaaatgcctttttgaatcagcaaatggaagaccgacaggataacggatgcccatatcgctgtgccgaagccgtcgatttgaaagctgtcacccataatggacgcggtcatcataagcgtgatggcgttaatcacaaacaagaagagtccaagcgtcaccatggtgaccggcagtgtaaatataattaaaagcggtttaatcagcacgtttaagatcgataaaatgaggctggcgataatcgctgccccaatgctgctgatatggatggagtcaatatatccatcaatgacgattaataacaatgcattgactaaaatgctgactgcccattttaccatgtcatttcatatccctttctgacgggacgataaaaatccaaatgatataaatgagcaaaaccggcaagacacttgtcataatggctaagatgacagttatgactctgaggagtgatgcgtcccaattgaaatattccgcgagacctccgataacaccggcgattttcttatttttttctgagcgataaagcttattcattcgatcacctctgtgagtactttagtttgatggcgcctgttagtgattctgagaagacggtgatgttttgatcatgtgcctgatttgaagtgaacatcatttctttttgaatcgtatcatttttttccttcagcatctctacatccattaattcatgggacagcgtaccaagattgcttttcagctctgccttcactgcgagatcgtccggaattgcaagctctacatttccagtcgttgtttttgcataaatggagcggcagtctgattctgttacgttaatcgcaatatttccgttaaagctttgaacgtcaatggattcgcttttccctcggagatcgatcaatccgttaatggtttccgcttctatcgtaccgcagctgtggcttgcgagcttaatttgcccgttggccgtttcagctatggctttttcggctgttaaatacgagaacgacagcacgccgtttgtcgttttcgctgagaactcttttacatgtaaatgttcccctctgaccggaccgttaaacagcttcacccgaatcttatcatactccttctgaggaatatacaaagtgacattcgttttcatcgtctttttctcagtacggataaaaaacttattacctttgatttcacattcaatatgctgaagaaatgcgtgtctcgccgcatcctggttgtcagcgcgatataccttcgcctggcattccgctctgatatcgtcatcttcccaagggacgatatttacgctgccattggcaatttgcagctcaacactggaaaagtcagtatctttaaattgaaaaatgtgctgaacatcatacgcatggccaaagtttaaatcaaggtcaacttccttgacctttttcacagcagaatcaatccagtcaaacagcttggctcctaaagacggtttaccgctttctttttttgccgttgtaaatggctcttcctcgtcatgaacgtgaactgagagcgctgtgattttctcttctttttccttgtagtcgctgtcaagcttttcaatcagtgtcaaagcttcttgtgctgtaagctttccttcctcaacaagcttaaggattcgttccttttcttgcttcattacgatctcctccccattgtctacttatgctgcacgcaggaccttaatgccctgaatcacattccaaatgataatgccaatgacaactaagaaataaataaccgctcccccgatgattacaaatacaggaagcaagctgtctccatcaatcgcaacggctccgccaagtaaagcaataaaaaggaacagccagccgacaaacggaacaatgtgagaaataagagagcgtatcgcatggcgttttgtttctttctcatttacaacaaaatatgcgacaatcggcacaatgattggcgcaatgaacacactgaaataacaaagtgatgcaataatagcttgattacggttcaattcattccacactcctattgtgaattgtccatgacaaaagatcagggacgttttacttatttatacgtttaaaatctcttcaggtttcaaattcattctttagacatgctccgatttacggaaattggattttaaaaagttttagaagtagaatcttccggctataccgattacaatatgtaaaaagcttacggcaaccaaggaggctggacaagcaatggagaaagatcccagtgactatacagtaacacaagaatcagtgttaaagctgattcaggaacaaaaaagaatgaatcgtgaaatgatcaccgagcttgagcagattcacggacccttcccgatctctcacgatatccaatatataaaagtgctgctcgacagcagcaacacacatattgttcaagatttaatgagtgtaagtaagcagctgtataagaagactttgtaattgcggaaaacatatcattcattataactgaaacaaagctaaaggttagatgacaatatcttgccttttttgttttgaaaaaacaagtgattccctggctgtcacaaaatgattgtaacaaaaaaaagcctgccggcacatccagttaatggactctgtcggcaagctgtaactatcagaaagagatagccgttcaaaattaacgtaacaattgaagcacgttttgcggctgttggtttgcttgagcaagcatcgcttgagaagcttgagaaagaatgttgttctttgtgaaatcgctcatttctttcgccatgtcaacgtcacggatgcgagactcagcagctgttaagttttcagaagaagcaccaaggttgttgattgtgtgctctagacggttttgtaccgcaccaagtttagcacgttggtttgaaacacttgtaattgcactatcgattttaacaatctcagtgtcaaaactaaaatcatctgctgaaacatcgataccttttactcctaaagttgttgcatccatgttaccaattgtaacattaatattttggccagcatttgcaccaatttggaatgtaaatcctgctgtttcactaccgtctaaaagtttttttccgttaaattcagtacgttgagaaattccatcgatctcttcagttaaagcatccatttcatctttaattgcagttaaatcttcagtttgctgtgtacctgtgtttcctgcttgaacagtaagttcacgcatacgttgaaggattgcatgggtttcagtcaatgcaccctcagctgtttggataagagaaattccgtcttgagagtttttagaagccatttcaagacctctgatttgtcctctcattttttcagagatcgctagacccgcagcgtcatctcccgcacggttgatgcgaagacctgaagaaagtttctccatgttttttgagctcgcactgttgtttgaagacaaacggtttagtgtgttaagcgctgcaatattgtggttgattctcatgtgaaaaatacctccatgtgtatatgtttttgaaatcaaagacttccttttctttgatttctggcgtatcagattccaataaagcttctaacctatgtagattcagttattgcttaaggatgcctttaagccccttaatagggtttgtctgcttaatttggaaatcatcatccgcctttcaattcatatatcgacagccatttgtaaatgtttaggcgttttcccaaagaaattataccaaagacgaatctaaacctattatgccgtaaagaaaaagcttgcctgctaagcccaaggatggacttgctgacaagctgtcccctcttaacagaggtttttttaagatgtagctgtttcttttgctttcaagagcgatttcatgcgtgttttgtcacgttcgataacaggcttcaaataacggcctgtatacgattcttccacttcagtgatttcctcaggcgttcctgacgcgacaatggttccgcccccggctccgccttccggtcccaaatccacaatgtaatcggccgtcttaatgatatcaaggttgtgctcaataaccagtacagtgtctccgttgtctaccaaccgttgcagcacgacaagaagcctggcgatatcgtcgacatgcaaacctgtcgtcggctcatctaaaatgtagagcgtgcgtccggttgagcgtttgtgcagctctgacgcgagcttcacgcgctgcgcttctccgcctgacaaggtcgtcgccggctggccgagcgtaatataacctaaaccaacatcataaagggtttggagcttgcgtttgattttcgggatattttcaaagaaagaaagagcatcttcaaccgtcatatcaagcacatcagagatgctttttcctttgtacgtcacttcaagcgtttcacggttatagcgtttgccgtgacacacctcgcatggaacgtatacgtcaggaaggaagtgcatttcaattttaataatcccgtctccgcggcaggcttcacatcgtccgcccttcacgttgaagctgaaacggccttttttatagccgcggaccttcgcttcatttgtctgcgcgaatacatcacgaatgtcatcaaatacaccggtgtatgtcgcagggttggatctcggcgttcttccgattggcgcctggtcaatgtcaatgactttatctaaatgatccaaacctttaatctctttatggctgccgggcttcgctttcgctttatgaagcttttgcgccagcgccttatgcaaaatttcattaacgagtgtactctttcctgaaccggaaacacctgtaactgctgtaaacgtcccaagcgggaacttggcattcacttttttcaggttgttttctgaagcacctttaatttcaatgtaacgtccgtccggctttcttctttcaggaggtaatgggataaactttttccctgataaatagctgcccgttaatgagtttggatcttccatcacttcttccggtgtacccgcagatatcacctgtccgccgtgaatgccggctcccggtccaatatctattaaataatctgctgccatcatcgtgtcctcatcatgttcgacaacaatcagcgtgttcccgagttctctcatatttttcagagcgctgatcaagcggtcgttatcacgctgatgcagaccgatagacggctcatctaaaatataaagcacaccggataagcgcgagccaatttgagtcgccagcctgatgcgctgcgcctctcccccggacaatgtacccgctgccctgctcaatgtcaggtaatcgaggccgactttgtccagaaagcttaagcgctccacaatttcgcgcaaaatcaaattggcgatctgcatatccttctcagaaagggtaaggtctttaaagaaggcaagtgcgtcggcgacagacagctcggtaatttttccaatgtggcggccgtcaatcagtacggcaagcgcctctttctttaaccgatagcctttgcacgtcggacaagatttctgagacatatactgctccatttgctcacggatgaaatcagagcctgtctccttatagcgtctttcaatgttgcgcaatacgccttcaaattgaatttcaccttcgcgtatttgtccaaaatcattttcatatcggaaataaatcaggtcatccccgctgccgtacagcactttatccagttgatgcttcggcaaatctttgaccggcacatccatatcaatcccgtagtgggtgcagactgcctcaagcagctgaggataatattgtgagctgatcggtgtccaaggggcgaccgcattctccttcaatgacaaatcttgattggggatgacaagatcggcatccacttcaagcttcattccgagaccgtcacacgtcggacacgccccgaacggactgttaaacgaaaacagacgcggctcaagttcaccaattgaaaatccgcagtgcggacaggcataatgctcgctgaacatcagctcttcctcaccgatgacatcgatcataacccgtccttcacctaaacgaagcgccgtttccaatgaatctgacagccgggctgccacgccttctttcacgacaatccggtcaatgactacctcaatggaatgcttcttgttcttttctaattcgatatcgtcggaaagctcagccatctcgccgtcaattctgactctgacatagccttgtttcctaatctgttcaagcactttgacatgagcgccttttcggcccgagacaatcggcgccagcacctgaagcttcgttcgttccgggtattccagaattctgtccaccatttgctcgatggtctgggatgtaatctcaattccgtgttccggacaatgaggcttccctactctcgcatataaaagacgcagataatcataaatctcagttaccgtaccgacagtagacctcggattgcggctcgttgttttctgatcaatgctgatggcgggagagagccctcaattgcatccacatcaggcttatccatttgccctaaaaactggcgggcataagcagacagcgactcgacataccgtctctgtccttcagcatatatcgtgtcaaaggcaagggaggatttacctgatccggacaaacccgtgacaacgacaagctgatctctcggaatcgttacatctatatttttcaggttatgcgccctggctcccttcacctctatccgatccatagccatttgttcatcatccttccgcttttagctctaaaagtaaatcgcgaagctccgcggctctctcaaagtcaagcgccttggcggcttccttcatttcatgctccatctgttcaacgactttctggcgttctttcttcgtcattttcgacagcttcggcgcggcttttgttttgtattccgctttatcctcagctgctactgtggcacgaatgacatcgcgaatttctttatttatcgttttcggcgtaatgccgtgctcttcgttaaaccgctcctgctgctcgcggcggcgttttgtttcattaatcgcaatttccatagacttcgttattttatcggcgtacataatgacgcggccttccgcatttctcgctgcccgtccgatggtctggatcagcgaccgctctgaacgaaggaaaccttccttatccgcatccaaaatcgcaacaagggatacttcgggaatgtccaaaccttccctcagcaggttgatgccgacaagcacatcgtacttgccaaggcgcaggtcgcggataatttcaatccgttcaagcgtcttgatctcagaatgcagatagtttactttaatgccgatttcttttaaataatcggtcagatcctctgacatcttcttcgtcaaagttgtcacaagcacccgttcattccgctcgattctagcttgaatttcgccgatcaagtcgtcaatctgaccttcgattggacggacgtcaataagcgggtcaagaagccccgtcggacgaatgatctgttcgaccatttcatctgtatgttcaatctcgtacggccctggtgttgctgatacatacacgatattgtgcatatgcttttcaaattcctcaaaacgaagcggacggttatcaagcgctgatggaagccggaagccgtgatccacgagcacctgtttccgcgcctggtctccgttaaacatgccgcgcacctgaggaattgtcacatgcgactcatccaccacgatcataaaatcgtctgggaaataatcaagaagcgtatacggcgttgaacctggaggccgcagcgtcaaatgtcttgaatagttctcgatgccggagcagaaacccatttcacgcatcatttcaagatcatatcttgtccgctgctctaaacgctgcgcttcaaggagctttccgttttcatgcatgaccttcagctgctcctcaagctccttctcgatattttgaatcgccttctccattttctcggcccgcgttacgaagtgggatgccgggaaaatcgcaacatgatctcggtcgccgagaatttctcctgtcagcgcatccacttcccgaatccgttcgatttcgtcaccgaaaaattcaactctgatacaatgctcatcacgggatgccggaaagatttccactacatccccgcgcacacgaaatgtaccgcgctgaaagtcgatatcgttgcgggcatattggatgtctacaagttttctgagcagctcgttgcgctcaatttccatttcagtccgcagtgacacgaccatttcccggtattcctcaggcgaaccgaggccgtatatacaagacacactcgcaataataatgacatctctgcgctcaaacaaagctgatgtggcggagtgtctcagtttatcaatttcatcattaatactagcgtctttctctataaatgtatccgtttgaggcacatacgcctccggctgataataatcatagtagctgacaaaatactcgacagcattgttcggaaaaaattccttgaactcactgtaaagctgtccagcaagggttttgttatgggcaatcacgagagtcggcttattgacttctttaatcaaattagacaccgtaaatgttttcccagttcctgtcgcacccagcagagtctgatgcttcttgccctcctgaattccttttacaagcttttcaatggctttcggctgatctccttggggctgatatttcgagactaactcaaagcgatctttcacaaaaataagcctccgtttctttaacgaaatcttcctatagatatagtaacacaatggaaagcaaaatcactaaaaatacgaactaaagttcggtggttttttatttccagctgtttttgtgtataaaaaacctgcttttaaaacgtaaaagcaggtattcagtctttatattcattatgtccgatttattcttcttttttctctgcagcttttttggccatatacagtccgccagccacaagagacacaacatccaatcctacaataaaatacgtttctgtatagccttttaaataagaggcaaacagcaatgcagctgttaaagcgatcgccacataatgattaaaggtgactctagtaaatagaacaacaagcataaaagggaaaaacaatgcaaaaacggcttttgtaatcaacaaaaaccctcctcagggattcttcatctgatctgattatagtaaaaaatgaagaatcggacaatcgtgcattcgctccctctactacaccataccccttttcagccaaaatcaatcactatatttgcattttggtgccggtcaaaacttattccatggtgccgctgttctaatcagcggcactttttttattacatcatcaagtccgccgccagattccgagaataaaagaaaataggcatacagtaccagtacggccgcatttttcaggataatataaccaacttaactattcattttatttaggactttctgcgtttgacagcattttcctgaaaacctacaattaaatgatagtgtttactatcattttttaaacacaggctccgcaataaaaagactagagagaaaaacaaaatgaatgaagaaaagaggggtttcaaatatgtattctgttttatttcgccaggcagaagagtccagccagctggctggagcaaaaggaatgaatttgattaaattgaccaaacacggtcttcctgttccggacgggtttattattcaaacgaatgcgatcgcacgttttatggaggacaaccagcttcaagagactagtgaaaacgtcgaaggcgggatcatttccggaacattttcggatgagctgaaagatgagctgactagttccttttataagcttagagaatcatatcgatccgtagccgtgcgttcttcgtctgcctcggaagatttagaaggcgcctcattcgcgggtcaatatgaaacctacttaaatatcaaaacagaggaagaatttctggctaaagtgaaagaatgctgggcttcatttttttctgggcgggtcagcagctataagaaaaaaatgaacaatcaaatcgcagagccgttaatgggtatagtcgttcaggggctgatcgattcagaaatgtcaggtgttatcttcagccgcaatcctgttacccatgatgatagagagcttttaatcagcgccagctacgggttgggtgaagctgttgtttcaggaagtgttaccccagacacgttcattgttaaaaaatcttcgtttgagattcaaaaagaaataggtgcaaaggaaatctacatggagtctgcggcagaaggaattgctgaaaaagaaacgagtgaagacatgcgcagccgtttttgccttacagatgaacaagtgattgaattggctgaaatcacaaaaaaaaccgaagacctgtacggatatcctgtcgatatagaatttggaattgctgatcatcaaatataccttctgcaagctcgtccgattacaaccattgatcaggacaaaaaggcggcagaagaaaaacgcagcttcatgattaccgacactgatatgaatgatttctggcttaacatggagtctaatattgaaggtccggtgagtccgttattttcatccttcatcgtgcctgcgttggaatatggcttgaagaagagcatgcaaaagtttccgattggtgtagttgttgatgaagtaaaactttatcgcggacatatttattccaaaaaccaaggagggcagcagcctccttctgaagactgcggcaaagagcttttcccgattttatcggagcatatgtatgacatcattaatcacacatacctccctttttaccggacactggaccagctcgcacaaactgagcataccgcagaaagcgcactggatgcttttcaaaaactaaaggccttttatctcacggcttatgaagagcacttcaatatcgttttcccgcaaatccttttaacaaacaaactgcaagcgatgtatcaggacattcaaggagagtccgaaaacgctcatttttacgagatgctgacaggaaaaatgaacaaatcactggaaacggaccgttgcttatggctattttctgtggaagttcaggagaacccgaaccttctggccatttttgaaaacaacaagcctgaacaactccaggagaaattggaacaaacagatgagggaagacacttcctgaagaacgtccatgaattcttgcaagaatacggatggagatctgttaaaagtcatgatctgattgaacaaatctgggtggaaaatccgtatttcgctctggccaatattcaaaattatgtccgtaatggctatcattttgacaatgaatttcagaaaacgaaagaaaaacgagagaaattatacaatgaattcttggaaaacatagaagatcccggtttacgcaccgaatttgaccgctattatcaatggacactgaactctgcaaatataaaagatgatcaccacttttatattgacgccatgctggatgccaaggcgagaatctttctgctgaagataggtgaattgctggcggaaaacggtgtcattcaagatcgtgaggacctttggttcttatatgatgacgaagtggaacaagcgcttcttcaccctgtatccctgcaagaaaaggctgaaaaacgcagacagatttttcatgagtatgagctggcccaagccccggcctacctcggcaccccgacaaaagaacagctcaaagcagctgaagaaattgtcggcgctgtgatagaggatgaaaaaaacacagagaatcatatttttggcattgcggcatcaagcggcattgcgacaggtccggtgaaaatcattcgggacgccaatgaattttctcaattcgcgcctggggacgtactcgtttgcaagatgaccacaccgctatggaccagcctgtttcaagacgccaaagcgataattacagacacaggcggcattttgtctcacgctgcgattattgcccgtgaatacggcattccagccgttctcggcacacgcacggcaaccgaaagactgcgagacggtgacatcatcactgttgacggtagcagcggcaaaatcacagttgtcagccggtcctgatgcgtccccctctttcttatacaagcggggcgggtgtatacttgtcctgccagtatactcgtgaggtgaaacgtattgagaccgacaaacaagagaatccttgatgctgccatgcagctgctcgtcaaaaaaggatatcgcgcaacaactacaaaagaaattgcagaaaaagcaaatgtaagtgaagcgacgattttcaggaactttaaaaacaaacaaggactagttgaggctttgctttctcagcattcttcaaacagaggcagcattttggaacaaacagaaggggatttgtacaaagacctgcttcatatcggaacctgtctcttggaggagctcgaacatagaaaagatatcattaaaatcagctttcgtgaaccggccatgtttcaggatgtcattaaccacgtcactgaatatccccaatctatgaaacagctattggttgattatctcaaaacaatgggtgagaaaggggttattcagacaggaaatgaagcggagcatgccgacgtgttcatgtcgattatcttcggttatttcattcaccgtctccacttaggagaccgggtcatatcaatgccccaggaaaaaatgctggagcacagcacagctctatttgtcaaaggaatttctgctgattaactccttggcataataaaaaggaggatcccaatgagctcaagaaaagaatgggcgctgatcgtctcgctattattgggggccattctggttcccattaactcaacgatgatcgcggtcgcgctctcatctatttcccatacgtataacgagtccatcgcaagcatcacttgggtggttaccgtttatttaatcgtgatggcagtcacacagccgattgcaggaaagctcggtgacatgtacggcaataaaacaatgtacttatggggagtcggcctttttctaatcgcatctctaggctgcgccctttcaccgagtctgctcctgttaattgtctttcgggcattgcaggctgtcggcggggcattgcttacgccaaacagcattgccattatccggcatgttgtttctgaaaaacgcctaccgaaagtgtttggatttttcggactgggtgcgggacttggtgcagcactcgggccttttatcggctctatactgattgacagcttcagctggcattcgattttttgggtcaacatcccgttcctcgccattgctttatttacggcattaacgatgtttcctcaatataaagaaaataaatctgacgcgccgctggatatcatcggctctctcttgcttgcaggcagcatcgtttccattatcctgctgacgaaaaatgaggctccatggggatatgcggtatacagtgtattgatacttctttttgttccgctttttttcagaagagaaatacgtacccagcaccccatcattgactttgcactgtttaaaagctcaacctttacaaatgcgaatctatcagtcttgttaagcaatttgatgatgtatgccgtcttattgattatgccgttatttatgacgaaccaatttgggcttaatacgtctaacagcgggatggcgctttctgtattttcgatcttcatgtcagccagcaactgggtgggcgcgcagctccatcacaaatggggagccaaaaaaatcatttttctttcatttgccatgatggctggtgcgaatctattatttttgctgttaagcagctcgcattctgtcttattcctcatgctctctcttatccttggcgggctcgcttccggagtcggtctgaccagcatgcaggtgtcatcccttgccacagtagaccccggaatgtcaggagtggcatccgggattttctcgaccttccgttatttcggaagcatcatttcatcagccttaattggcctgatttcgggatatcacatcctatttatgattctctttgctgtatccatcatcggcgtttttgtttcattgggcatcaaatctgatgaaacggcacggatagaaaaaaactcagcgtaacgcaaaacagcccggcatcgcatcttcctgcggtgccgggctgccttttatgatccagaagcggctgcttcgtcttcacggtcatcctttacgaagaggatgcccaattcatgatgttctccttcataagaagctcgctggtcaaaacggatttctccattcaaaccgataatttcaagctttacatatgcacggttatgctgaagcgcttcatagaaatcagaaacgttcttaaccggtatgccattgactttcgttatgatttccccgattttcaattccagatcctcagccggcgtattggggataatcccaagcaccattaagccctgatcccttttcgagaaataaaacggagccgcgttatcattcactctttgctttatggacaaaaaaatgcgccctaacaaagcagtacagaccgctgcacccgcaagcggcgtccacagtaagctcgctgcaccgagaactgcgacggcaagaccgagaatacaaacgcgtttcgctgtgatccttatactcgtttcaggcagcgatccctgtaccctttgtccaaatccgacaaagtaaggaatccatagaaaatgaaatgagccgccgggaacagtaaacacgggccaccagctaaggtgcgattctaaaccattgccgggcacgagaaggaacagcggcaaaagccaaacccggtttgccagctgctgtccgatcggcaaaccgcggctgcttacgacaagtgccggtgatgttctcacatgcgcagaacgataagcaaccgctccttcagtgataatcagcaaacctagaaacacagccacagccggccaaacaactgcaaatccttgctgaaatctctccagaaagggctccgcctgatatatttgcagtccaaaacctatcagcatactcacactgacgatatatgcagcagacatccagtttgcgcgaagagtgaacgctgccgctgcagtgataacggcaataatcgcaagtaaaccgagaggaatcgatattccgagtccacctaaaataactgacaaaagaagacctggaatcagtccctttgtatatgtaaatttcagatcatcataaatatctgctattcttgtatgaaaggtttttcgttcccgtttgattcttacatagccgaaagccagggttatgatgataaaaaaccagaaaagcgggtgtaagaagaacaagcccgcgctttttaacagttcaattccccattgaacagacactatctctcaccgcctcaagccaaacatgttactcatattctatcaaatattaaatggcttggatatcctcaggagagtttatctctcttgcgtcatccacagcgtgacattcgatagtgaaaaatcctttaaatagtggtttacatccacatccaataacccgctgattagatgcatcgacctttttatatctgtcagattaattcctaatcgcttatggtttttcattaagtagttaaaataatgtttggcgcattcctcattaatgtcatttactgattcgacattggtgtaattgaccaaatatctgctgaacagcataagaagacttagtgcttttgtagctgaaaatgttacgtcttgtgttctgtcttttaattgttccactaattcataatattttttttcacgcacaatacttgccctcttcaattgtgaacccccattttctttatacagataagcacgggccagtataagcagcagtactggagtgctaacaagcattctcgctaacgttactctttaaatacctgtcgttcagctgccattaacctgattactgttctttttagaaccttcttatattgtatgaagtaaacaaagactaggcaacttgcaaaagtttcattttaaatgcatattaactcgttagaaagtctctctcatatattgatatcgggtaataacagtcctttataaatgtttatttgtgaaaatttttttaatttcttgtcaaaaactcattttttatgtgacttatgatccataatctctttaagtacaaagaaacaggagatggaataccatctcctttaattgacaaataatgatttcaatgctgtttgaagctgcaaatcatttttgtcatctgattttttcttttctatctgctgatttaatgtctctgcagtgcgagtgtcgatcacaccggttttattcagcttgttttgatcctgaaaagccataaccgcttttttcatgtctttgctgaaatagccatcctcacgtcccggatcaaagctgagaccttttaacaatacctgcgcatgcttgacgtcttcattgttcatgtccactttaagcggctctttcagctgtaaaggcccagcggaaaaataatcgggctgcttaatcgcaatggtcggttcaattcctttcttatgaatccaatttccatttggcgtcagccacttgtaaagcgttaatttgatgttgctgccgtcccccattggcacagcctgttgaaccgttccctttccaaaagacgtatcgcctacaacatcataatggccagcttcctttaatgcgccggcaagaatttctgatgcagaggcacttcctttatccgtaatcacattgacagggtacgcttttttatgggtcaatgttgaaaaataacgttttttatccccattgcgttcagcaatctgaatatacggctgatcctttgtaacgaaatgcttaagaatttcttccacactttgaagatatccgcccgggttgccgcgtacatcaatgacaagtccttttatttcttttttctcaagctccctcagcgcttttgcaaaatcctctgcggtgtgctcagaaaaagtagagatggcaatatatccgacagaatgcccctgtacttttttctctgatgcaaaaaccgtttcgagcggaatctcagctctcttgatccggaatgacagctgcttcttcgttccaggccgctgaatcttcattgaaacgctggaccctttttttcctcttatttttaacacagcgtggtttaaatccttgccggccatcgattctccattgatgctgataatttcatcattaggcttcaacccggctttttccgctggcgatttcttgaatggagaaacaataataattttgccgtcttccattccaacctcagccccgatgccttcaaatgaggaatcaagagaatcagaaaattgcttagctgtctgcttgtccatgtaaacagaataaggatcatttagcgtagacagcattccctggatggctccctcgagcagcttttctctatctactttttctacgtactcattcgatattaactcatacgctttttcgattttgtccatagctttatcccgttcagagtcagcttgtgccgtcgcgggaactgctgcagtctggggcttatccatctcaagcaggttgattcccgcatatacaccgacgcctccgaacagcatgctccctgctgctatcacagccattattttttgattcatcctttactcctcctgtatgccagactgtctttaccaaaacctagagatagtatatgtaaaggatggagatttcatgtaatcatagaagaaaaagaaggcaaatgaaaagccgtcccgaaaacggaacggctttttcactttatactcgcaaaaacttgcggatggaagtcagacttccccatactccaattactgcgccgattgcaatcagcactagcgaaacttggaatacaaatggattataaggaagaagagagacaaatgatccttgaacctttggaacgacccatccgatgacgtattggtaagtgctcagcaccagtgcaatcggaatcacagaaccgaatacgcctagcagcaatccttcaaggaaaaacggccagcggataaaccagtttgtcgcgccgacaagcttcatgatttcaatttcttttcttcttgcgaaaattgtaattttaatggtgttggaaattaagaacatcgccgtaaataccaggccgataattaacgcgattccgatgttgcgggaaacgccgaccactttaaacaaacggctgacctcttcttttccataagtgactttataaacatgatccattttttcgatctttttcgccacgttcggcgtatcatgcggatctgtcgttttgacgacaaacgcatcattaagcgggttttcctgatccttcattgtcagggattttccgctgtcaccaaaactgtcaaccagctggtcaagctctttttctttagatgaaaaagtgacactctgaatgcccttcagttccttaatatcgttctgaagcttgtcctgtgccttctgatctgcagtcagatcaaccagcactttgatttcgacttgtttttctgctttcgtggccatgttattcaaattcagcataatcactaaaaacacgccgactaaaatcagcgtaacggttacagcactaatggatgcaaatgtcatccatgtgtttctcccgagagatttaaaactctcacgcaagtggcgcccgagaattttaatcatatgaaccatactcccctcttgactcatcacgcacaatgataccatcttcgattgcaatgacacgtttcttcatggtgtttacgatttctttattatgtgtcgccatcacgactgttgtcccgcggttattaacttcctccagcgtcttcatgacttcccaggacgtatccggatcaaggtttcctgtcggttcatcagcaatgacaacatcagggttgttcacaattgatctggcaatagatacacgctgctgctccccgcctgaaagctggtcaggaaattgtcgcgctttatgcttcagctgcacgagatcaagcacttcaagcacccgtttcttaataacagacggctgttctccaatcacttcaagggcaaatgccacattttcaaaaacagtaagtttcggaagaagcttgaaatcctgaaagacaacgcctattttgcggcgcacgaaaggaatctctttttctttaattgtcgcgagatctttatgattgattaaaatttgtccttttgtcggtttttcttctctgtaaatcattttaataaaagtagatttacccgctccgctcggcccaacaacatacacaaactcaccgggatgaatggtaacagaaatcccattgagcgcttttacgccgttcggataggctttatatacttccttcatctctatcatgaaatcacctaatcttttatatcattttatctatcacacggtcatactcttcgaatgcattcgacaatttatgatccattcatttgtaaaaagatgaaaaatctgaaagttccctttttcaatacacttcattatacgtcaaatttagacataatactattacagtttcttttcattcatatttaaagaataaatattcatttgggttggaagtttcgtttattacgaaaactgtttttccatttaaatgaatcaaatccactacttgacaatcattgataaataatataaaatttcgtcaaaattacttttttgtatattaatgttaatatatccataaaaatgaacttggtatcactctcaacttgttatctcatatttacataatctaagtagacacgaactaacagaaaaacatcattaatttatttaaggggtgttataattgaagctaatttacaaggacgaatacggtcctctatattctgaaaagtcaaagaattctatccttaaagagcctacttattttgaagttgattccaaagacaacttaaatagaattgttgataaaaaaggacattacacttatcaaaacaataagcttcataagataaaacctaaaaatataggtgcatctggcagtaatagtggataccctctcattatggataaaaaaggacactccttggaatatggtagagaccttcttgaagtatcaatgagaaataaactttatattaggaccacagaaaaagaatattgttatgagtacgataccgaagttgaaccagatactattcaaatttttgatgacaaagtgcttttgaatttaaaattaagacaaatggttgtacttgtatctacttcaggtaaagttttaaatagctttggtcttgatagatacagaggtgaaggacaaaaacaattaaatgttcccatgttctctgtatatatagaagatagaaattctatattaatttcagatgccattaattcaagagtaattgaagtcgacgaaaatggaaatataatttggaaatatggaaaggatggtttattaggttcggatcaaggactcttatggaaaccaacttgcgcaagaagactttccaatgggcatactattattgcagattccaaaaataaccgattagttactatagatcaagataaaaatattgtaaatgagattgggcaaacaaatgtttctaaattgtttctcacatatcctcgctctgttcaaatgcttgataaatataattggctggtgacaaatacacacaagaattctatctttatcatgaatcaaaatcaaaagaaaatcataaaacccataaatgattcttataacaagttaaatttattttggccaagatgtagtataaaaaactcggatgatgaaataatcatagcggacggaaagaataatagaataatgtttattgacgataaaacattacaaataaaaaaagtaattgattactattatgaacaaggtaatagaatgacaattattgatcctcatgatattaaaataaaccctaaaacaaaccttcttctcattaccttatctggaaacaatagggttatagaaatgactagtgatggcgagttaattgagagctatgataatctaaacgaccctcattctgcttattacttttcaaatgggattattattgctaatacggaagacaacaacatagttatttattatttttccggcaaaaaagaaatcattaataattttaaatctactaattcatgctgtgatgcctttaagagacctcgttatgcgctaccttataaaaatggatttctaatattagatacagacaatcaaagaattatatttttaaaaaaagagaataacgaatggattggagaaaatgtgcctatctattttcctgatggacctataatgaattatctttgttttcctcggtgcattacatttaacaatgataatgaactaatcttaaccgatactgaaaattgtaggattttacgccttgtgattgacgacactcttattaaggaggagcattcaaatgaaatataaagttgattcggcacatggtggtgaaggttgggtacctagaaagcaagatcactctacagaactaggtcatttctggaataactgtggcgtaaagggcgaattcggtaccctgtcacatgttttacttagaagtccaggtctagaggtagaacaaaattttaatcctgctgatatcctatggactgagagaatagaaccatcgaaagcaagagaacagcataataatcttattgaagtttatcgctcccaaggggtagaagtagacttaattgatgataaagcagctgaatcttttccaaatattttgtatgtcagagatttgtttacaatgacagatcaaggagcaatcctatccaggatggcatcagaggttagggctggagaagaagtaattatttctaaaaaactatctgaactcggtatacctattttagcctctcttcactcggatatgatattagaaggtccagacatattaatagtcaatcctgatctagtatttataggttatggtataagaacaaattataaagcagctatgtatgtcaaacagatactattaggattgggatattccgaagttatcatcattcaaactacttatggctgcggacacttggatggtgtagtgaatattttaaattctcggtatgctgccattgttccaaaaagagtttcatatgagttgtacataggattaaagaggcatgggttttcaattattgaacttgacgacatgtatgaaatagatcagttgatgtcaattaatttcgttcagctaaacgaagagactcttctgattaataagggtgccaaaaatacagtgtctcaatatagctcatgtggctttgaatgtctagaaatagacattagtgaattaacaaaaggaggcggctcaattcattgtttaacagggattttaaggaggatttaacgagatgggcgtttctatagtaattccaattaaagttaactcaatcgatgaaatatatattgatttcatcaattacatcattgatttttcttccaatgtattaactaaagacgttgaaataataatagccaatggaagttctaaaaatatttatatatttgctaatgaacatcttaaacatttgaaaaatgttatacattttatcccacatcgttcaattagaacaggagacaacgataaactaaacgggatatactctgctttaatgtacactaagcatgataacattttattagttgatgatcactatagagtatcaagtgaaacgcttgcagatatattaaaatactatgaaaaatatgattgttttaagtttatgcctaaactacatcaatacccacattcagctttaattgatacatgtggaatgtttattgttaatgtattagatagtagaaagcaatattgcggccatttagcctttaaaaaaagtttatatagtgaatggggatttatcaatagagattctctatttgatgagtttgctatggaaaaacatttacgaaaaaagggaagcagagtcggatttataaaagatatcgctctggaagccaaacaagaaattccgtttaaaaaatttcttgagcagagagtacgttatgcttatgaaaacattgctactccctatcgctttacctttttcgccatgatcttaccacttttaatactgttaagcctgatagacacgaactatggtctgaattttgcattttttctaacaagctggacctttgtcatatcaatagtaggtcaattcatttatggtaaacaaatcaccccttggtacacttcactatatagtcctatttggttctggttttatccttttactacgtggatagcaatttacaagtaccttaccggaggaatcatgtttggcgggaataatattaggagggcaggatagatgaaaatcactcaaaagattatagggccacaaagtattgtatacttcaaaaaagataaaaatagagaatttgttgaaaaaatttccactgaacgaggagaagatgaattagttgatcaaattcacttttataaaatgttaccaaaagagattaagcctctttttccagccctatatgattatgatattaaaaacaggccgtttcgcatgtcaatggaattatgtgattttccaacattaaaagagattattttatacaatactaagcaaaacaagttgaaggaacacttatataatgttatacaggacatatttgaaaaaatacacaacttaaaacaaacacaggcaacaaaaaattatgtagaacatttgtatatagatcgttgcgtcaatagaataatagaaacaaagaaattaatgaaagaagcacaatggataaacaacgacttttacttagagggttcaattgtatccaacccaattcaaacggtttttgaaattataaataataataaggatttattaatacctgaatatctatgcactgtacatggacagctaggtccttctcacttaatgttaaacattcaaaagaagaatagttacaaactagttgatccaaagggatttcatgaatttcatgatccattgttggatattataaaaataggtaggtccttcctctatgggatggagtggttagaagatgacttgtataatattaaatattcttttaaaaatgaatatcttacaatagaagattttaatttaattaactatgatgaagtatatatgaagaagtcatttaaacctataatggatttagccataaataattacaaaaatgctgccctaagagtatatgccttaatttgctgtgatctaatagcaaatttaccttttgcatatttatcaggtggtgaaaagagagtagtagctttatataatctcatatatgctgctagtttagatttgtctcaattaaatgatgctgtaaataaggagaaacatatatatgaaagtctttcaaaataacagatataatatatttaattacaaggaaagttctatctttatagaagatagacaaccccattctgttcttacaatagcaaatttaaaaaatcaattagttgtggtgagacaaatgcgaaaaggaataaataatgaaaccgtcgaattgcccgggggacaggttgaagataatgaaaaacctatggacgcagcaaaaagagagctagaggaagaaactggactaatagcaaatcaatttattcaaataggtaatatttatcctctccctagtttaattaatcgccaaatcacatatttttatactgaaaatattgttggttataataagactattaaacaggatgaagatgaaaatatacatgtagaatatcacaaatttccaaaagtcgagtataatcttaaaacccaaaagtggagggatcaatttcttgcttatggagtatatatctgcaaattgaaaggaataatataaaaattttagaggttaaaaatggatgtccaatctatattatttgatcttgataacactttgttaaatagacaaaaaacttttgaaaattatttagattcatttatctccaagtatattttctataactccccgaccgaaaagaaagatataaaaaataaaataatagatatggataaaaagggagaaaaagataaaaaggaattgttttcagaattacaacatagattaaagtggagattaaccccttccgttgattatttagttgaagaatataaaacaatattcgcaaaaaacagtatagttatggatggaacttttgaggttctaacattttgcaagaataaaaatttaaaattagggattataactaatggagaatcattttatcagaagattaaactaaataacacaaaccttacatgtttttttgattttatcttaatctcagaggaattcggtaaagctaagcctcatcgctctatctttaaattcgctattgataagatggccattgatccacgaaaatcaattttcattggagacaatcttatttctgatatttatggtgcttctaggtttggattttatactgtttggtataatcactctaatatagtcaaacaaaatcccataactgtaaaacctaataaaattataactagtttaagtgaattgttgaaaataaaagactggtagccgaaaggagaaaaaagtgattattagtgttgattttctaaatcatttacacagtatttataataaaaataacgatctatccgaaaatgttaaaagaatattcaaagaatataaatgcagtaatatttatgaacacagtgtaagggtagcacatatggcaaaaaaattagctgtacggtttcgagccaatgaagaatcagcatatatagcagccttattacatgatattggaggtattgttcctaatggaaaaagaattgaaattgccaatatactaaaaatccctctttttcctgaagagatagagttcccactaattattcatcaaaaaatctctaaggttattgctgaaaaagtttttttaataagtgaccattctattcttaatgcgatagaatgtcatacaactttaaagtcgaaccctagtatgttggataaaattgtatttatatcagacaaaattgaatgggatcaaaagggttctcctccttacataaatagtctaatagaagccttagatgtttcaattgattgtgcttcaaatgtctatattaagtttcttatggaaaataaaaataatctaaaggttattcacccttggcttagtgactcttataactattttaaaaaataaccctcaactcaatactatatataatattatgtatttaaatccatcaaagttgtgtaaatattggcaagattctcttaagatagccttgtattttttgtttaacactcttagacctaggattaataactgaaatattaatggtctaagagtgttgattatattgaacgattaattaacatgttttatgtcggaaacaaggcattcaatttacactattatctttatttaccttattaaactaatatatattctattcccccccctgattcacatccaatcgaactaagtcttggttgaatgctttaattttattaattctttttataatgaataactataaacaatattattagtgtagaagattaaataatttcatttttattacaatatgaattaataattgtttttcaaaaaattccatgttataatttggtaaaccactgaaatttaaggagggttttatgagtaaagtatttgataaagaagaaatccttaaattgattccgtgttctgacaaaattgactatatatacttagcggggtcaataatggaaggtttcggaaatgatgcttcagatattgatgtttttgttataagtgaaaatccagatagactagcttatgaacctactaattttacaagagaagtaaacatacaagtaggagaatcattcataaaaaatattgttatagacagtattagatatgattttgagtactatcgttcttctagttttacttctttaatagaaaagttgaataatttgaattttaatacagaaaattatattccaaggtttacagcagatgaaatagatcttttacatagattaaaatttgctgagccgcttctgaataaaagtgcttttaatactattctaaacaatataaattttgaaaatttaaataattatttagtaataactaatattgagtcatatgatggacatttagaagacttacagggagctctttcttgttctgattttggtacttcatttgtgcttttaaaattattattaaaatattctcttaatgcttatttagcgaaatatggagagacaaatccaggagaaaaatggttatttagaaaattaagtagatacgccgaaaaacatggtgatcaacatttacttgataagtatcttaatttattatgttatccttttgagaaagataatatcaaacattatgctcaaaaaactattaattttactcaaccattaattatcaaagctcaaaaataaaaacggagggaagtaatcacatgatttatcaaaaaaatatgtttgtgagattccgtatcatcgatactaaaccttatcttattcttaatgacaatgcatttatcttagacgatgtaggcgttaatatttgggaatcaattgatagcaaaaaaaatattgaagaaataataaataaaatctcaaatgtttactcagtagagtctaataaaataactaaagatattaagaattatttaaaagatcttgaaaaaaacggattaattgaagtgtgtaaagaaatctcataggtagttaataatgtctggaatgggctcctttagtggaggtgagattaatgtataaaaagcctgtattaattaaggtgaagcttcctgttgcgttagagtttgtttaattactacttaactgattgacctatcttttatgaattgaggtgagattaatgtataaaaagcctgtattaattaaggtgaagcttcctgttgcgttagagtttgtttaaatctaaaaccagactaaaataattgatcaaaaaatcaaaggagcccatccctaacattattattaaatcaacaactactcataaaattttaggagtaaggtatacattatgctattagaagaagttttcacgtatatagttctttttgttatagttaaaacatgtatgtttcttataaggaaaattaggggtaatcttttatttgatgtgctaaggaatttattatttttcgtcccttttattttaccagcactttatttaggcttacctaatttaatttttcaaggttcgattaattattatttattatccattttttcatcatttttagctttaagcattaagtataaagaatttaaaccttacttcaataaaaatttttaccaaatcctcccgaaaatttcttttaaagactttttaatattggaaatatctttgataggaagcgctatttttgaagagtttttttacaggagttttgctcctcactcctcttttattgtaggcatggcattgtcaggaatcctatttagtattgctcattatatacagaactatacaagaagttttttcgatttaaagacatatattttattgtttttattaggaatggtttggtattggagttataaaaatactgggactttaattccagcaattttaggtcatttagtatataaccttcctagtatgattttcacctattttcactttaaatcatcaagatttcggtgaggaaaaagggggttataatagtgagtagaatcataattgcaactataaaaagaaattatatagtttcaaagagagtttttccttggtcttttattatagccagagttcttatgggaatctatgtttctgtatttgctttttttacttttaaatatatgtttgatggaaaaacagaaagtcattttttaaagtatagtaatgggatagactatataagctttgtagttctaggagccggtctttatacatattctatatctgtaataatgaatgtaggtagatctcttatgttagaaaatatagaaggtactttagaaagtatacttgtctcaccgtgttcacgtttagggtactttttaggagttttttttgaacaaataggtagatcaagtttagagtttctaatagttatatttttcagtttatatttaggtgccaatattgaaattgagaacactattccacttttaatagtaatcattattactacaatatctcttttcagtattggtatatttatagctactctaatgttatttctacgcgacacctatataacacagaatactttatttatagttatgggattagttagtggagtatcttttccgagggagtacttacctaatatcctctactatttatcctatttgtccccattatcttatgcactttctttattccgaggtgttatgacaggacaaaacattttaaattacacaaaggaaatcttggacatatttgtcttgagcctagcttattgtctttttggtttactttggcttaaatgtctggaaaaaaaaatattagaaaatacatttaactaagggtgatagtaaatgctaattgccaaggatattagtaaaacttatatattgaatgagagaaaaggtttttttataaaaaaaaaaacagagattaatgccttgaaaaagctgaacttaacaattaagccgggtagtattgtagggttattaggagttaatggcgcgggaaaaagcacaactattaaaatattatcgaccattctagcgccaactactggctccttgaaagttaatgaagtcgatgcattaaaatatcctgtagaagcaaaaaaattgttaaacgtaataactggtggtgaaagaaatttatattggaggttaactgctagagaaaacctcgaatactttggagcattatatggactatctaaaaaagaacttaaagactatataccatcatcacttagtttggttggattaaaagactcaaatataccagtcgagagatattcaaaagggatgaaacaaagattacaaattgctagggggctagtaaataatcctaaatatttatttttagatgaacctacattaggcttagacataaatattgcaaaagatttaaggcaatacataaaaaaattagctcaccaaaaaaacaaggggatattattaactacccactatttatctgaagttgaggagctatgcgattgggtttatataattgacaaaggaaatttgctcacagaaggcactccttcagatattgtatcaaaaataataccagaaattcaattgaaaatagaattgtcaaatctaagttgtgaattaaaaaaagaattattgtactatgttggtgcaatagatgctaaaatacattttttcaaagatcatactaattactcgattttattatcatcgaaagacgatttaacttctgatttggttaatattataacaaaatacagaacttccattctaagttttaaaaccgaagaacctaatcttgaggatgcattattaacattaacaagtaaacaaggtgattcaatttatgaattggttaaaggtaattaaagctgaaatatataaacaacataagaattcatttcattcaacaaaagcttatttttcattattaatatggccaatattaaacttaattaatgcctacttatgttacaagccttttaatttaaacgatttaaaattatatagaattaatacatctgacgaattaatatcctttttattaataggttttttcacttatatttcttttaagtcgttaatgcaaagtgctttacaaatgagttatgaaagatcaaatggaactttggaaacaatattcttatccccagcaaatcgtttatcattaatatacggaagaagcttaggatttatattcggtaatatatggatgttttttgcgtttactttttttataatgtgttatatcggatcaatacctatatataatttagtctattttccaatatgtttcattctaatcgtcatttcagcaactttatggggaggcttattaaatactatctttcttttttctcgagatgcttcgatattgtttatgattattgatgatcctatgatgttattttcaggtgtgagaattcctctaactcttttcccaatatgggcacaagtaatttcttttatatttcctctcactcatgttttagctgtagtcagagacttaatgttatttggagatatctcgttatcctcatggaatcatttattatacttattatcagaattattatttatgtatatgataactttatttttgctatcaaaagctgaaaaacatgcccgtattaatggagaattaaccttttattgaataggttaaaaaaaagtaaaaaatacttaattaaagtattttttactaaatttatttcttatagtttattttttaaactacatgttttttatacttttatttagcttgattacattgttaactaaggagaaatacctttgtctaaaggtgtttctttccttagttaacaaatcaatctccaatcatcttactttttttctgacagccatttggcaataacggcggcttccttatcatctacaagccccttcggcatattgccgcggccgtttttaataatgctttcaattttgtcttcgtcgtatttgcctccgacctcttgaagattaggccctgacacaccttctaaatccttgccgtggcagcctacgcagctttgctgatataattcttccccttcagatgcagaggcttcagtcttgctgcctgtatctgtcttctcttcttttgcatcatttgaaccgcaggcagccaaaagaactgaaagcgtaaatacaagcattagtatcgataactttgatttcatgttgagaagcacaactcctttacgatctcttccatattataacctcgtttaagcacgtttgaaaccctcgcccagcacctcacttgcatccgccacaatcacaaaagctgactcatcaatctgtttgacgatttgtttcaatttggtgaattcagtttgcccaaccacgcacattaaaatcggacggtcatcgtcagtatatccgccgactgcagagatttttgtcacgcctctgtcaatcttctgtaagacagcctccttgacagcctgctcctgctttgtaatgatgagcgccatttttgaacgattaaagccgacttgcacaacatcaatggttttgctggacacatagacgccaagcatggcatataagccttgctcaatattaaatacaatcatagccgtaacaacgatcattccgtcaatgatggcgagacacttccccaatgacagaccggagtacttatgaatgatctgtgcagccaaggctgttcctcccgtcgatcctttccctaagtacacaataccaattccgatacctatcccgacaccgccaaaaatcgccgccaggagttcatgatgagtggcgggctgaatatcccttgtcagaaacactactagcggcaaaaacacagaacctgcaagcgtctttagtccaaatttcccgccgagcaaaatgacgccagcaataaataaagggatattaataatccactgtacatacgctgcttcaaaaccatatgattgtaaaatcgtactgatcccgctgacaccgccggcggcaatcttgttcggaagcaaaaatacattaaaggacacggccgtaatcgctgctcctatcaatatgtatacataatcccgcaaaatccacaatgttttattccgtacgtccatcatatatcctccgtttcttccaatgctctccgatagcattttaatccttccctgattagatgtaaataacacccaaatacagtggtaatatgctaaagcagcagtgaaatcaaggatataaggaattaaaaaaacacacccgttgcatcaggtgtgtttttcagcttatgaaagcttagaacgcaggtaggcatcaataaacgtatcaatgtcaccatccattacagcttgaacgttccccatttctgtattggtccgatgatcttttaccatggaatacggatggaatacataagaacggatttggctgccccagccgatttctttttgttcaccgcgaatttcatccagctctgcctgctgctcttcaattctgcgctgatacagcttggccttcagcattttcatggctctttcacggtttttaatttgtgagcgctccgtttggcatgtcacaactacgttcgtcggcaagtgagtaatccgaacggctgaatccgtcgtattgacgtgctgtccgcccgcgccgcttgcacggtacgtgtcaactttaatatcctccgtacgaatatcaatatcaatttcatcgttaaattcaggcatgacttcacatgaaacgaaagatgtgtggcggcggcctgatgaatcaaatggtgagatccgcacaagacgatggacacctttttctgctttgagatacccgtaagcgttgtgtcctttgatgagcaatgtcactgacttgattccagcctcgtcacctggaaggtaatcgagtgtttctactttaaagccgcggcgctctccccatcttgtatacattctaagaagcatagagccccagtcctgtgactctgtaccgccagcaccagggtgcagttctaaaatcgcgttatttttatcatacggctcgctgagaagaagctgaagctcaaactcattgaactcttttgttaatgattttagttctttttcaagctcaagctggagatcagtgtccggctcttctttcaaaagatcatgagtcatttgtaattcttcgtgggattcattcaattttttatacgaattgacataatcctttaaaccgtttgcttcatttataaccgtttgagctttttgctgatcattccagaattccggatcagccatttgttcatctagctcagcaatgcgggcctcctttgattcgaggtcaaagagaccccctaaagtccgctaaacgagaagccatattttcgagctctgctctgatttctgataattccatttcattcacctcattaaaagatccgcaggcgcctgcacgcgccgcggtcagtaaacttgccggggcgaactattcagtacggccgcagcaatttttatattttttcccgcttccgcagtggcatggggcatttcgtccgatatcaaccactttgcgaaccggtgctttctttgcttttttgttatcgtcgccttcttgcggctgatgagctgttgtttggccttgtacaacctcttcacgctccagattgttttcaatctcagctttcatcacaaattttgcgacttcgtcctcaattgattcaatcatatgctcaaacatcgcaaagccttccatttgatactcacgaagcgggttcgtctgcgcgtaagcacgaaggtgaatcccttggcggagctgatccatcgcatcaatatgatccatccatttagaatcaacggcacgaagaacgataactttttcgaattcgcgcatttgctctttgccgaattgctcttccttctcattatattttgtgatgatgcgatccataatgagctcaagcatttcatccggttctttcccgaagatatcgctcttctcaagcgcaccttcatcaagataagttgtgttgataagatcaactagaccgtcaagcttccactcctcaggaagctcttctcttggcgtatagactgcaattgcgcgttcgagagaagacttgatcatattttcaacgatttcacgcaggttttcagagtcaatgacttcaaagcgctgcttataaatgacctcacgctgctggcggagaacatcatcatattgcagaagctgtttacgcgaatcgaagttattgccttcgacacgtttttgtgacgattcaaccgcgcgagataccattttgctttggattggagtagagtcgtccatgccgaagcggtccagcatcgccattgtccgctcagctccgaatctgcgcatcaattcatcttccatagaaagataaaattgagtaatccccgggtctccctgacgtccggaacgacctcgaagctgattgtcaatccggcgtgattcatgtcgttctgttccgacaacagcgagcccgccaagctcttttacaccttcgccaagcttaatgtccgttccgcgccccgccatgttagtcgcaatcgtaactgcgcctttttggccggcctcttcaatgatctgcgcttcacgttcatggtttttggcatttaacacttgatgcggaattcctttgtttttaagcagcttagaaatcaattcagatgtttcaacggcaaccgtaccgacgagaacaggctgtcccgtcatgtaacgctgtgcgacatcctccgcaactgccttaaactttccttccatcgtgcggtaaattaaatccggtcggtcatcacggacaacaggcctgttggtagggatcgtgacaacctgcatgttgtagatgttgcggaattcttcttcctctgtcttagctgtacccgtcataccggcaagtttttcgtacatccggaagtagttttggaatgtaatcgtcgccaaggtcatgctttcgttttgaatctcaagcccttccttcgcttcaatcgcttggtgaagcccctcactgtagcggcggcctttcatcagacgtcccgtgaaggaatcaacaataacaacctgtccgtcttccactacatagtcaacgtccttttgcatcgcaacgtgagcttttaaggcctggttgatatggtggttgagcgcgacatgcttcacatcaaagaggttatcgatgccgaatgctttttccgccttcgtcattccttcttcagtaagctgtacagcttttgttttgatatcgtacgtgtaatccttctccgcttttaacgtgcggacaaaagcatttgcctgtacgtacagcttagtggattttgcagcttgtccagaaatgataagcggtgttcttgcttcatcaattaaaatagagtcaacttcatctattaccgcaaaatgaagcgggcgctgaaccatctgctctttataaagaaccatattgtcacgcaaatagtcgaagccaagctcgttgtttgtggagtaagtaatatcagcggcataagcttcccgtttttcgtcttttgacattgagtttaaattcaaaccgacagtcaaaccgagaaactcgaaaattttccccatttgctcagcgtcacggcttgccaagtattcgttgacagtcacgacgtgtacgcctttaccggttaacgcatttaaataaacaggcagggtagacgttaatgttttcccttcccctgttttcatttccgctatatttccgtcatgaagcgccacgccccccatgagctggactttaaacggaaacatgcctgttacgcggcgtgaagcttctcgaacaacagcgaaagcttcaacaagaagatcatccgttgtcgcccctttttcaagacgctctttaaattcaattgttttatgtttcaacgcgtcgtcagagagattttcatagtctccgcgaatcgcatcaatatcgttagcaattttttcgtatctattcagcgtacgttttgttggatcaaacattttatttaaaattccaagcatttataacgctcctctatcttcacatgcctattttagaggcatgtataaataatttactagtccatgtatacctctcattatcatatcataccttttgttatttccaaagaatttgcaaataagaaaaacaaaaaccttccgcggacatcacggaaggcttctcttcattattcagtcggttcaattaagccatatttcccgtcatttctgcggtacacgacatttgtaaggtttgtttccgcatttgtgaaaacaaagaaattatggccgagcatattcatttgcaagatcgcttcttcactatccatcggctttaaattaaagcgtttctgacggacgatgtccaagctctcctcctcttctatgtcatcctgaaccgcaatatctgtatcagagccaagaccgtttgccaataaatattttggagagccctgctcacggaatttacggtttactttcgttttatgcttacggatttgacgttccagtttgtttgttgcgagatcaattgcgttgtacatatcctcgttatgcacctcggaccgaagcgccagatctgtcatcggaatcgtaacctcaaccttagactccttgtcattgtaaaacttcaagttgacgttcacatcagcatccacgctatggtcaaaatagcgctccagcttgccgatcttcctctcgacatgatcctttaacgcgggtgtcacttcaatattttctcctctgatgttatagttcatcaaagaacgcctcccttttattaaggatatgtatctatttctcttttaccctttacaattcctgctgaaacataaatcttttgtgaaaattcagtgaactttgtcgaattttgtttgtatttgctctgttattggcggttcggaggtatatgtatatgctgattgaacgaaacaaatacctcacacacgcctaattgattaaaaagggttccatacattgatgaatagacagcatccattttctataatgaatcagaaaatgttcctttaaatactcacagaactcatgagagggaaaagagaaagagaccaattgatcaaactccgcaaaaatttggtcaaatgctttcacacaaatttcagcacaccgcgaatccataatgaagagaagtgttgaatgtgttgaatccaaataaaaaaaggcttggatcagatcttggtagatccgatccccttctgtttttgataaattctcttcagcctctatcaaataacacaacccctcttcgatggtaaaaagaagatgataataagctgataaaagcgtataatcttcaatgctcttcaaggcactcacctatttacgcttgtcataatatgtgccgtcaatcgtaatgttgttataagggtttaaatacgtcgtatgcatcacacgttttcttttcatctgctgaagttctgttgcgattgactgcttcagtctttccatttccttcacaatcagctgatcccatgtcaaaataagtttcatctgctttctctcttcttctgaaagcggcagagatatctcctgaatcagttcagaccgtgtagccacaaagtcttcaatttgctttaaaagttcatcgctttccggcgtattttgtatgtgtgacagcatactcttcgtctcagtgtatagttgatctatattattcatgcgatcccgcctgatccgtgccggtccttccgttcactttgaattgcttgtttccaagcatcgcgaaaatctgttacataaccttcaacctcagccagcatgcccgtatcatttttgatatttgcctgtaccaatctgcgatacatataatcgtacatcgcacccatagaagcggaaagctctatgttacggttaagtgtaaaatttaattcctgaataatattttgcgctttaatcagattttcatttttacgttccatatcatcattctcaatggcctgagcggcaagtcttataaatttcaaacagccattatacagcataagcgtcagctcaccgggtgtagccgtattcactgaattttgctgataggctgtataaggattttggatcgccatgtgtcatcctccaaattacatttattgtgctagaagctgtgataaataggacgattgttcgttcattttttgaatcgcagaatccattgcactgaattttgaataatagcggttttctattgtggtcaaccggtcctgcattttggtaatatcagtgctgatcgtatttaaatttttaccgattgaataatcattggttcccattgtcgagttgccggcttttgcttcaatgctcttcaccgtacttttcagggtgtcaccgatgcgtttcataatccctttatcactataggcgctgctgttcgatccacttgtaaataaagcggcgacactttgcggatcttcttgtattttagctttcagtttgtcttcattaatttctagatgtcctcgcatttggtaagcaccagacgttgtgatgccaaattcagttaattgataggtttttccatccgcactaacttgagaataaaaatcagtccgcatttgattcgtaccagtgcttatgctggtatcatttttcagcaaaccgctttttgccttctcttcccagagttctatctctttatcggacatggcttctttttgttcactcgtcagcggcgcatagtctctgtatttttcttctttcaacttttcattcaggctgtcaaccagttcattgtatttattcacaaactctttaatttggttgtaaatcccgtcaacatcagtagatacagatgtggtaacagggcctgtggctgcagttgtatttttgatcgaataagtaacgccattcactgtgaagttgtttgacagcttctccatttcaaagccgttgatggtgacttttgcattcgttccttctttgtaagcagtaatcttattatcagtgtccaaagaaaaacctagctggccagacataaaatctgctgtagcagagtctgctgcttgtatactgcctcctgcacctgttgctttagaagaaaacgcaatggtttccacatactctgtaccattccaaattttatctttaaaagctgatactcctagatctgagctgttaagtttagaaatcacattatcaatcgtatcagcgctcgtcacactaatgttcactgtttttgcggctgtctcaccaggcgcaacaacgttaaatgccaaattataatcgccctgtgtgtatcctgtataattgtttgccttatatgtcgcagcagttgccaaacttgctacttcaatagtagatgaagagtttgctgcacttgcagttcctgtagcagttaacacagattcgtttgagcttgatacggttttactctgaaacgtactcggatatgtcagcttattattagacatataatcttggaattcttttattttcgagtttacttcacgatagctatcacgctgccattcaagagtctgctttttttgtgttagcttattaagcggtgctctttctgtctgcatcagctttgatacaatatcatctatatccattcctgacgccagacctgttattctcgtgaccatttcaaaccactcctaatctactttttttcatctacaaataacccaagaaattcagtcatagctgcataaaaatctagccaccgccttggcggaatttcacggatcacttcatttgtagagtcctctattacttttacatagtattcatttaacttctcatggagctcaaacttcagatgaacttgcgaaggttccaaaaacttgttcattccctctaccatttcagcaaggtcggtatatgaaacttgatgaacaggaacctcactctcatgatctttctgattatgtatttgagtatcatagcgatcccaaacaggttgtaacgtagtgagcctttcaatgttcaattgatcatcccctatgccccaatctatcgtttatatcgactaaatcgagataacattacacatatttttggaaaaaatctcatccgttttagatttcttagtttggaaatacgtttataaaaagtaagtggagaatccggttattatatcatgatttaataacagcaagtggaatgattcggagttagaaatataaataaaagaccttggcaacgccaaggtcctctctaaaattaacgtaacaattgaagcacgttttgcggctgttggttcgcttgagcaagcattgcttgagaagcttgagaaagaatgttgttctttgtgaactcgctcatttctttcgccatgtcaacgtcacggatacgagactcagcagctgttaagttttcagaagaagcactaaggttgttaattgtgtgctctaagcggttttgtaccgcaccaagttttgaacgttggcttgaaacgctagtaattgcagtatcgattttcgcgatctcagtgtcaaaactaaaagtagctgatgaaacatcgatcccttttactcctaaagttgttgcatccatgttgccaattgtaacattaatgttttgggtagcatttgcaccaatttggaatgtaaatcctgctgttacactaccgtctaaaagtttttttccgttaaattcagtacgttgagagataccatcgatctcttcagttaaagcatccatttcatctttaattgcagttaaatcttcaggttgctgtgtacctgtgttaccagcttgaacagtaagttcacgcatacgttgaaggatggcatgagtttcagtcaatgcaccctcagctgtttggataagagagattccgtcttgagagtttttagaagccatatcaagacctctgatttgtcctctcattttttcagagatcgcaagaccagctgcgtcatctcccgcacggttgatacgaagacctgaagaaagtttctccatgttcttttgtgctgcaccgttgtttgaagacaaacggttcagtgtgttaagcgctgcgatattgtggttaattctcatttttatttcctccctgaatatgttgtttaggcacgtccttgtgcctcaattttgtaatcggcgagccatttgtgccctctcccggctacatcattaatatcggattgtctctgattttgttaatacaaaaataaaaaaatcctcactttttttgtgaggataatgcggagatcacatcgctggataacgacgccgcacggttattttcttcctgaatggttaaataaatctctttccgatgaatatcaatatgctttggggcttcaattccaagcttcacttgatccccctcaaccgcaatcacttttacttcaatatcagcacctatttgaatcgcttcgcttattttccgcgataaaactagcatgattctcctccaatcggatgctttgtcgtatatgaggagtcgtgtaaaacgacttgcttagccatcatgttcttgcgattcacaataatgggagccaataaattcgcagtagacttttcaaatggctctgccatagtcaatattgtcatgacttctacgtcttgaatattatcgatatccaaaagttcagcagttgattcatcaagatcaaattcataattcttaaaaaagataaacggacttacgacgataaacgcaagattttctgaagtgacggactgcagtgccacgaatggagagtcttctgaaagcggaagtatgacaaattgtttttcttctaaaaagcctggaatcccgctttcaaaaagaatgatttgttcttcttttatgttcatttggccatggtacttcgtatgaatgatcattgttcacgatccttttctttttacttttcgggtgattctttcgggtattctacatctatatttaaatcagggtattggagcatgtcaaccttaacatttcctggcgtatattcaacaattggcttatgcggctcagcctgaataacaggctttcgcggcgtaatctgaacatcaagctgtgacggagtatattgtattttcaccctagatagagaaggagcataattttcgcctaattgaatttggtgcatttcagagttcctccttgcttgtgaagcgattgggttccccttattttcaatcctcataagctcgtcgccttcttctgcagtacgcgctattccctccattacatcctcatgcccttgttgtgcggcttcttcaattctcttgaaaacatgctttctgtctaattcttcccatgcttgtgtctggtcaatcgtgagttttccaggtgtcaccgatatttccatttccgcactcggctgttcgatctctagatcagcttgaggctgctccatttttaagctggcaggcgtcgttgttaaaccaatttttccttgaacactatgcataatcaatctgggaatctgcatcactctacctcctgaactataaaaaaagcgaactcctgagagccgcttactttaaaaagtcaattaatgtaggctgaacaatttgcgcattaacggccagagtagccctgtgcacactttgctgcgcaataaattcagttattacttcttccagttctacatcttcattgtctgataacactttggtagctgtttcttcttgcgctgacagtcttgtattaaccaattcaagacgattatatctcgctccaagatcagatcgttcagcactcatgccgtcagaaaaatgatcaatatcatctaaaacactgtccatgccatctagcgaaccagaatttagtgctttctcaaaagaatcaagcatttcaaatacattctgcccgctttcagaagtgcctccaaaagctgactttggatctgaattcactttcaatgacatattatttgatatattgactacgacatcagctgtatcagaaattgtataagttccgtctccgttatctgtaaccggaggcttatctgaatttgtgccattaaagatatatctgccgttcacttgtgtattcgcaatatttaaaagctgttcctttaactgctttacctctacgccaatcgcttgccgctccgactcgccgtttgtatcattttgagcttcaaccgctaattctctgacctttgacaagatgtcaattccttctgtaatgtttgtttctgtgttttcgagccaggtaaaggcttgagaagcattgcttttgtactgctgcacttgagacagttgcgtattatactttaagcttttcattgctactacaggatcgtcggaagcttttgagatttttttccctgaagaaatctgcgactggagtttatccagcttcgagtagctcgaaccgatatatctcagtgagttttgctgtatcatgccttgtgttactctcatgtgactctacctaccttcctccaacacccatgccgttgatcactttatcaagtaattcgtcttgtaaagtcaccattcttgcagctgcattgtatgcatgttggaattgaatcatattcgtcatttcttcgtctaaagaaactgcgctcatttgctgacggtttatgtcagcatcatttagctgtgtttctgtattagacgccagtcgattagcctcttgagcttcgatccctagctcgccaatcagacccgcataataatctaaaacactagtttctttaccgttaatggttattttaccggttaaaacatttgctaattttgtagcatttgcgttatcgttggctgcaccagtcagtgagaaagcaatgtttgcgccttttgaatctattatgctgtcagccactttgatcttgcccgccgcgcccttggcaggttcagtttcaccgccagtaaaatcaaaaaagtctccgccttgttcaccgctcttggtcacaccatttctgtgcacttcattgaaagctttcgcgaattcaagcgccatattgtcaagatcagaaagcatttccgggtatacgcccttttcttggccgtctgctgttatatacccgtaagactctataaatcctaaaagggatcccttgctgctaaaggactccgcctgcacagctgtatccccgattgaaatacttgatactaacccagtttcattatcatagttggctgcaagttctgaaacctcgtaatttttaccgtccaaaacagttcctagcgactgtttatttttatcaaggatttcaattgatacagttccttcagcagatgcaagtgcattcccgcctgatttgttgtagttgactttgatatcaaccattgaggataatttatcgatcagcaaatctcgctggtcatataaaccattcggaagaagcccgaccggctctacttgtgcaatttgcttatttaaactgtttaattgagaaagcagagaattgacatccaacacagttgtatttagctctgcttttaaattcgattggacatttgtaagtgattcagaaatataattaaacgtttcagctacagcttgtccttttcgagcaacaacagaacgtgcactttcttcatttgtattattcgataattcctgcagagaattccaaaacgaattgagcacactgttcaagccgctgtcatccgtttcatttaaaacgccttccatttgggacagcgctttggccttcgtgtcatagtatccggcactgttgttttgaagacggtattggtagtcaagaaagatatctcttattctctcaactgattttccttgaacgcccgtacccatttgtcccgctgttttttctgcgtttttagatacagcagggaaatagtcagttgcttccaatgagacccgctgtcttgtataaccatcagtattggcatttgccacgttatttgcagtcgtgcttaacgctgcctgctgagcgcttaacgcccgccttgcagtttcaagccccataaaggtagatgtcattttctgaattcctttctgctaagcttttgaatcaaacagtttcattttgctgcttttcggcagctcagctttaattgatttgctgtaattgaagttattttccttaggaaccagcatatcgtacgaaatagagatgaattgcagcgcgtctcttgtcagctgcctattcatctcatttacttttttcagacgtccgagaacttgagaaagagattcgtatagttgttccagctcttccttttcactgcctgaggttttggtgatacatgcggaaatagtattattttcgctatatccgagaaaggccgaagttgttttgatccggtcatcttctgtctgcgtgattgcttgaatatatttttgctcttttgtcaaaatgttagaaagctcttttgttttgccggctttgagcgcttccgtcttttcttcagacagcgtgagcaggtgctcatgcagaacgcaaagtcgcttcaattgttcaataattgccttcgctgacatgggctttctccttttttattgctttttataaaaattaatcatatttttcgcgatatgatttgcgtctactttgtatgacccgttttcaatttgcgctttaagctgcgcaattttttcctgtcgtgaaccagtgactgcgtcggatgcatgttgcatttctttagcctgtgatgaaatttcaattttatcttgaggctgtgcagcagttttttgcaccgcttgcttatcataatttttttgatatggattaacggattgtgttccaaattgattgattttcataggattcctctcgctttccgttgcagtctttaaacaatcttaacccttttatcgactgcgttttcagttagtttagggaatcagctgtttttggtattataggcatagtatgtgtcttttttactattttctttctcgattttcagagcatcctcgtggttcaaatgatccatttgatccttaatatcggactggcaagccttgcagaatttgccttctctaatcgatgtcccgcacctttcacaagggtatgccaaattaggaagatgagtgatctgaattcgcttctgcctgatgaatttcaatatcagctcttcttccacacctgtttcctcagttatccggctcaaagttgattgccggttttcctgttttcttaaaaatttatagacagtctcaaatgatttttcttcttccttaatacacgcctgacatacggtttgcagctttgtttttaaaaataaagcattgcatttcggacaattagccagttctcccatcttttttctccttattagataatatgcctgtgtcaatttctagtgattatatcggcataaaaacagaatcatttagcttctgatcaaggtaaaagatgacactgaagcggcttttcctttttctaataagcagcgggctgcgaagtgcaaggtggcgcctgttgtataaagatcgtctattaaaatgatattcatacctgctgctgaattattttttgtatcaaaaatgcgctctgacagcaggcgttctgttttctttttctttgactgcttctcattattcaggcgaatgaggggatggtgggaaggccgatctaaacattctgccaagagctgtgcctggttaaaaccgcgctcttcttcccgttccttgctcagcggaataggtacaagaacaaaatgcttatcggggtaagccttagaaaaggttgaagaaaaatcacttttaaatgcatttatgatttctgcatctcctctaaatttaaaacgggagagcgcttctttcatcatatcattatatgtgtaaactgaacggttttgacgcaatagcaaactgtctctgatccttgttctccacacctcgcaatccctgcatacggcatgaacagattgaggtctgccgcacagggggcagatatgtcctgtgattttctttaatttgcttctgcaagaataacaaaccttttcatcaggctttagtaaaaaaagggctctccatgtaacatcttgagaaaattgcgaatcacataataaacagatcagtttatgaatgcctcctcctgcttcgtttgacataaatcgcttggactctctgaaactactgcagcagattcagccaaaatgacaagcattgctgtgtttttttgtttatctaccagctcagctttcgtatatgcgatctttttaagatcagtaacgtaggatggactcactttgtttaaagaaagtgccaatacatcgttttggcatacttggcaagtacaggccatatgaagctggtccatatatcggtcgagcagttctttcattacgatttcttttgaattgacaagcatttttacagctcctcatcatcggttatatgagtatactgtaccacgttttcaaataatggctagtctgtacattcaacttttgctgccaattcattcatttcttttatatgctttcttgcatcgagcatactctttgttttgccgaagtgaaagtaaatgacatcgccgtccgcatattctttatgccggccggttcttcctgcaatttgaacaagtgcgctttccgtaaagatagacgattccgctcctagtacacccgtttgcaccttggggactgtgacgcctctttccagtattgttgttgtgattaatagatcgagctgaccatctctgaattgctgcactttctcctttctatgcttgtcttccgcgtgcacagatgcggttcggcaatgaacacctttaaagcacgcagcagccttttccagaatagaaacggaaggaacgaataaaaaaacaggcctcccttcttttacatgaaactctatccatcttttcaccgctggcggaattttatttcggtttaatttcttcttccagtttccacaccatacaaagcgcggttcgggtaaaggtttccggtggtgtcttgcggggatgcgaactgaatgtaactgtccgttcagtgcttttctttttaattctttaggaggtgttgcacttaaataaacgagggtgctgtttttctttcttgctttttgaacagcgaattgaagggtttgatcagcagaatatggaaaagcgtcaacttcatcaatgatcataacatcgattgcatctttatatcgcaaaagctgatgcgtagtggaaatcataagcggagatagccgccctttgtcatcgcttcctccgtaaagcgctgaaatgtcagcaccctgaaaggcagccttgagtcttggagcaagctctaatacaacatcggtgcgaggtgttgcaatacatacacgcagtccttgatttaacgctgattctataccaggaaacagcatttctgttttgccagcgccgcaaaccgcccagatgaggagctcttctttttttgatattgcttcaattaaaacattggcggctttttgctgtccgcttgaaagcttgccatcccatgtcagcttaatagacttccagtttgattcattttcctctttccatgaatataaaggaacctcctcactcactctgcccatcatgacacaggaacggcaatacagcttattctttccagatgagtgataaaaagaaaaataccgctgatcagtttgtccgcacctattacatctatatctccgtttatttatggatatagaattttcagcagtgatatatccattcttgatatgccattcaatcatctcatcggaaaatgagagctcagtcctgagcaaatgacggcttcgaagcgtctgctgcaattcttttgaaaaggaactgtttttttcaactggcacattcacatagcacgcctcctttcgaaacagtatgcctgaatgaatattttctgtccaactattaaaataagaatataaaaaaatctccgctctaaaaacggagatttggccttatttaaaacaccagcaaattcctaacgcaccttcacccaaatgagtgccgattaccgcgccaaaatagctgttataaaattcaacatgaggatattttgcagaaagctcttcaatgattttcgctgcttcttcctctcgattagcgtggataacagcagctcgcataggcaaccctttactcgcatcttcgtctaaaagctcataaattcgcgaaattgcttttttacgtgtgcgaatcttctcaaaaggcacaattaccttattgtcaaaatgaaggataggctttacctttagaagactaccaatgaaggcttgggcgctgcttaatcgcccgccgcgctgaagatgggctaagtcatctaccataaaataagctcgaactgtttttttcatttcttccagttcttttataatatcttccggcgatgatgctccgtttttgattaattcagcagctttaagggcataaaagccttgagccaagcagctgatctctgagtcaaatggatacacatcaatattgtcgaccatcgaatcagccgctgctgcactgctgaatgttccgctgatcccgctggaaagatggatactgataaccgcatcataagacttgccaagctcttcatacaacgcaaccagctcgccgattggcggctgagaagtcgtcgggagctcattatgttttttcacttcttcataaaagcttttccagtccaactcaatttcttcacggtaagtctcctccctaaaaacaacctggagagggatcatatgtatctgatgttgttcacgcatttctttcggaatatatgccgtgctgtctgttacgactgcaatattcatagcttcgatacctgccttattgctttataactctattgtaagggaaacggcagcctaaaaaaagacctgcctagtaaaaggcaagtctcctattatactatctcatttctacccagccatttttaatggcgaccacaacggcttgcgtccggtcgtttacattcattttttgtaaaatattgctgacatggtttttaacggttttctcactgataaacaatgattcaccaataccgcggttgctttttccgtctgcaagcatctgcagcacttcacattcccgcctagttaaaatatgtaatggtctgcggatttcagggtaaacctcatgttgagggtgtgcagaaactccgcttgttgcaaggcggcggaattcgttaacgaggttgtgagtaaccttcggatggaggtaagatccgccctcagccactactttaaccgcttcaattaatgtatcagcatccatctctttcagcagataacctcttgcacctgttttcagggcatgtgttacataattttcgtcatcgtgaattgatagaataattactttagattcaggatacagctctacaagctgttttgtagcttccacaccatttacgtttggcatattgatatccatgatcacaacatcaggatgatagtgctcaacaatacgagccgcttcgtctccgtcatcaccttcggctaccacttcaaaggtaggttcaaaatccaatatccgtttaacaccttcacgaaataactgatggtcgtcgataataacaatgtttactttagtcacaagccacgcctccttgtattattgttctatatactctagcattcggtcaatatgccttttggctctattttacaaatcatagtcaaagagataacggaaccttaatcataataaatgtcccaagacctattttcgaatctattgtcatcgttccttccaataaatctactctttctttcatgcccagcaagccgaatgatttgtttttcttctctttcgcttccttcaggtcgaaccctttaccgttatcttttatcattaaaatcacaaaatcctttgtgatctcaactttgactgtaatttcttcagattcagaatgctttagcgcattagacacagcttcctgtgcgagcctgaagagcgcaacctcaaactgaggcgctagcctctgatcctctgtttctccaatgcactgaaaatgtattttgaccttcccgttatattcctcggttgtatatagatattttcttaaagttggaatcaggcctaggtcatcaagggccatcggtcttaaatcatatataatccttctcacttcgtaaagggcattccgaacattttggcggagatttttaatttcttggaatccgtcctctgcgccccggtcacggaaaatccgctcgattaattccgatctcatcataacattcgccagcatttgagcgggtccgtcatggatttctcttgagactctttttcgctcttcttcctgcgcctcaataattcttaagccgaaatcctgttttgcctgagcatcagcaagaagcagtccaacttcgcgcaaatcctgattcaagtagttgagcacaactgtaatttggcttactaatgattctgaccgctcaatgatttcctgaagccctagcaatctgcgctccaaatcgtcccgccgttcgcgcaattgcttctcacgctgctggatcatcgtcaattctacctgcagcttatgggctttttcataagcattgcggatttcctcttcactgaatctatgaaaattacggctgacctcggataaacggtttctcgcatggcgggtttgcacttcaagtttatcgccaagctcaatcacttcatacacctgctgtttaatttgtttcagttcttcgaccagctgttcatactgctggcgtgactgctccccgatttgaaaaacctcgtccttgctcccgtcaacggttttcagcatcttcatcaaaatagaatccagcactttggaatccatctttgttttattcataatttccctccgtcacggcgttgtcatatatttttattataaatgtaattgatctgcaaattatgtcgaattataatgaaagaatgcgtatattctagaaaaaaacatttttatatactatctactctttatgataccaaaatacgcacaaaaattctaaagactgtacgaatttgtataggcagtcttttatgcttagcaggagggtcagctagcatgctgcacagctattttactgtgaaagaagcaggagaacacgagattgttatagaaaaatcgcgttttatctgtcatttaagccgtgtttctaccgaacaagaggcacaggaatttatacagaaaataaagaaacagcactggaatgcgactcataattgctcggcttatgttattggcgagaatgatcatatccaaaaagccaatgatgacggggaaccaagcggtacagcgggagtgccgatgctcgaggttttaaaaaaacgcagactgaaggatacttgcgccgtcgttacacgctacttcggaggcattaagcttggtgctggcggattaatacgcgcttatgggaaatcagtgtctgaaggattaaatcatataggtgttgtagaacggaagcttatgcgaatcatgcatacttctgcagattacacatggcttggcaagattgaaaatgaattaagggagtcacaatttctgttaaaggaaatccattattcagaaaatgttgaattcgaaacatacgtggaagaaaaggaaacaaatgctttttctgaatggatgacagaactgacaaatggaaagagtgatattaaagagggagagttgacgtatcttgaaaaagccgtcaatcacataaaggagactgaataatggctgaacgcgttagagtgcgtgtgcgaaaaaagaaaaagagcaaacgcaggaaaattataaaaagaataatgttattgttcgtcctcgcattattagtagttgtggggcttggcgggtataaactttataaaaccattaacgctgcggatgaatcgtacgatgccctatcccgcgggaataaatcaaatcttcgcaacgaagttgtcgacatgaagaaaaaaccgttttctattttatttatgggaatagaggattacgcgactaaaggacaaaaagggagatcagactctcttattgttgttaccctggatcccaaaaataaaaccatgaaaatgctgagcattccgcgtgacacacgtgtgcaattagctggtgacacaacgggaagcaagacgaagattaatgccgcttacagcaaaggcggtaaagatgagacagttgaaactgttgaaaacttcttgcaaatcccgattgataaatatgtcacagttgattttgacggatttaaagatgtgattaatgaagtcggcggtattgatgttgacgtgcctttcgatttcgatgaaaaaagtgatgtagacgaaagcaaacggatttacttcaaaaaaggcgtgatgcatttgaacggcgaagaagccttagcatatgcccggatgagaaaacaggataaacgcggagactttggccgtaatgacagacaaaaacaaatcttaaacgcgctgattgaccgcatgtcaagtgcaagcaacattgctaaaattgataaaatcgcagaaaaagccagcgaaaacgttgaaaccaatattcgcattactgaaggtttagcacttcagcagatttacagcggctttaccagcaaaaaaatcgacacattgagcattacaggttctgatttgtatttagggcctaacaacacatattactttgaacctgatgctacaaatctcgagaaagtcagaaaaacgcttcaagagcatttagattatactcctgatacaagcactggcactttcggtaccgaaagttcaacagacgggactgacagctcaagcagttctggcagcactggcacaacaactgacgggacgacgagcggaagcagctattcgaatgacagcagcacaagctcaaacaacagtacaacgaattcaacaactgattcatcctattaaaaaatgcccggtccttttaaaggatcgggcatttttgcgcagaaaaaaactccggcacataagccggagtttttaattccttttcaccagccgtttataaaactttgtaaacggcttaaatttttcattcacgagtcctgtcacttctgctatgatttgcataaaaataatcaaaatgaagataataaacaaagaaagccaaattgtggcacttttaagtacaatcgcactgatactgaaaataaatccaattaaataaataactaagaccgacatccgatgtgaaaggccaaaggccatcagtctatggtgaatatgcgacttatccggcgctgaaatcggctgtttgtttaatattcttctgatgatagcaaatgttgtatcaaaaatcggtacgcctaatataataatcgggataacgatactgaacaatgtgacacttttatacaggcctaataatgaaagaatcgaaatactataccctaaaaacagtgatcccgtatctcccataaagatttttgccggatggaagttgtaaaacaaaaaccccagcgtgctggcaataacgactaatgagagtgacagaatgagcacttttccgccggatagcgccatgacagcaatcgttgacaggccgataacagaaagaccggcagcaaggccatccaatccatcaatcaggttaattgcgttcgtgatgccgacaatccataataccgtcagcggataagccatccatcctaactcaaatcgttctgttaaaaaaggtactgagaaaaagtccatttttaagccagtgcttacaatcataatggctacacctaattgaatcaaaaacttaacttttgcacttaattgatatttatcgtcaagaatacctaacacaataatgatgaatgctccgactgtaattgccgtcatccttgtttctgtgtaaataccggatgcaagcacgcctgcaaccaccccgataaatatggccagcccgcccatgcggggcatgattttgtcatgtacttttcgattgctgggctggtcaactgcacctattttaatcgcaatcctttttacgattggggttatgattaaaactgtcagcagcgagacaataaacgcaacaacaatgcgaatcatgcgttcgtcaagcataaagaagtctcctttggaattaaatgaagtctttatttatatagagaaccgttccttccattataccttctccttagttattataacaagcttcatcaaaaagaaacacgtataatcaaaaaacgcgcatcccaatttataggactacgcatgtttttgaatccctgtatacttcataatttgtctaaataagcaattccaatcttgtgtgcgagcgatgtttcggcgcatttctttataggtttcgtctccgttttgtccgagaactttttcacaagctgctataaaatcaattggatgatcaccttctacatattcgtatacatacggcttttgcatttttgaggttgacggaagattagtgcctacaacaggttttcctgccgctaaaaattcaaatagtttcagcggaaacacagcttgattatacggtgattgtttatatggcatgatgccaatgtcgataagctccatataatgaggcacttcttttggatctgccggaccggtccatatgacatttggaagcctcagcagctcttgaaacgaaacgtcaccattggtggcatccgggccaacccataaaaatgtccaatcaggcttttgcagggcggcggctttaatcattttaaaatcgagcttcggtttaatcccgccaataaaacctaacactgttccttctctcccctgcagtatactgcgatcgggagcttgtttatttgcagaaaacagctcatactccacaccgttttccacagtatgaaccttttctcgtcctgcagtcagttttttgtctacttccttgtgaagataatctgatgaacaggttattgaatctgctcgttgtataattctcagctctgccgatttaatgacttttcgccggaattcagacagcagatttgatcggccgctgatcggcgccgcccataagtcactgcagtcataaatgacctgatcccaaggatacagcgaagacagcagcgggaatccgggaaacgtgtaccataaacagcaacgttcaccgtttgcagaagcaggtgtaagctcatcgagtaatggggagagcttatgtctgtaaaagacatctgtatatcgtccgaaacgaaacatttttttctgcagcaggtctttgacaacgaattgcctgatgccagaatggacttcttgaaattctttaccttgggcacgcggagccggacatacccaaataacttccttcgtttcctcctgagcagctaaaaattctgccagccggtgccttctgtatctcaattggtcttttccccattcagcagtggcaacgatgacatgaatgattgcttcttttgtttccaccttcatcaccttttctctctgtttgcggctataatctttttttcaccgcgttttttgcatattgaacaaaacaccatgttgctttcataaaatgaagccgttcgatctccctgtagacaaaccacgtttttttcgcagccttccatttgttgctggaaattgagttattgacaagccgatattcagccaggcattcattcattccataggcaataaatcctttttttaaaagagacagccatgtggctaagtcctgtctcgttctgatattcggcatttggatctgtcccgtttgctccctgtcaatcatcaccgtcaagcagccgataattgtatttttcagggcgtcatcgtacgtcaggctttccggcgcatgaataaatttatcgagtggggtcccgtcctgcgccattaagctgtagcccgtgaaagaaaacgcacaggagcgctccatcataaactcaagctgcttttccagtttgtcttttttccatttgtcatcactgtccaaaaatgctacgtagcgcccttgagcgcgttccaacgctttgttgcgagcaaccgcagctccggagttctcttccaaatacaccacatgaattctttcgtctattttttcatactgctgtaaaatgtcgcgggtcccatccgttgagcaatcatccacgataatcatttcccaatgaggatggctctgatctaataccgaatgaaccgtgtcttcaatatagtcacgcgcattataggaaggtgtaatgacagatacgagaggtttccaattggtcatgatcacatctccatcgtatgattttaaaaggattccctgaaaaattcaggaatgacaacgaacataaaggcaatcgtaaggccaatcataacgccgagaactgctttctttttcggagacattccgccgcctgctgtctcacttacggtttcggaatcagtaacacttgccgctttcaggttaagctgtgtgtttttgagctcatacaaaaatctctctttatccactttggaatcctcgcttaccgactcgccttcaagcgcgtctatgctgctgcggatgacggcttctctttctgcatacagcttttgatcgtttttgaggaaggtggaggaaatggcttttaagacagattccgttttatccttatcctcgtcgctatagcttaaagtcagtaacgatttggattccgttttgattgtaagcttctctttgatctctgctacatcttcatccttttcatcaggaagcgcctccttcaaaaaggagtcgctctttaatagaagcggaatctcttctgtgctgttataaaccggatgatcatagctccccacagccaaagtatcttcagctgtatagctcttttgatcagcgatctgtgacggcaggatataccccgccgcacctaatataattggcaccgctatgatccaaatgatatttttttttatgcgacgggctattcttatcaatatatcgttcatataagtctccctgctttttgtagtctgttttatctgtacatcggctcaggcatttgtctggatcgccttaacacattcacggccgcgatgacgagcgccataaacacccaatggaaaaataaatttgaaacagagcttgggctgatacttgataccaggaaactgaccatagcggtaataagtccttctgtgatcagttttgactgattttctaattttctttcataaaacttgtaaagcacccatatgaggtaggcataaacggacagatatcccagcatgatgaacaagccaaaattagcaagaatttcaacaagccagttatgcacctctgccacattgtcagtatcatatacagcataatgctcaagataataggatacatttcctgccccgactccgaatccgtatgaatcaaggaaaaaatgccaagcgtttttcagcagatttgcccgagccacatttgatggaagcctgtcatgaaatgaatgcagcgtctgcggggccagaaacagctcccaaaactttgaatagattttgctggcgaaaagaactgcgaaaagagcaattcccgccgccgacagccatatagccattctctttaaaacaggcggcaatacaatgaagatgtagacagcaatacctgcaaaaatgcccagaaggctggctcttgaaccagtggcaaaaattaaatacaacgcacagagcgagagcacaaggccaattgccttgatgtatccattcttaatgtttttcatcatcgtgatgtaaaaaaagaagctgatggataaaaaggtcgcaaagtcattttgattaaaaaagaccgatgtcggataatgctgcttgtactccggtccgctgtacaatgtggaactcgcaagatgatggtgggtgatatgattgtaaaaaccaatgatcatcagaaataccgtcatcaccagccaaatggcataaacaatcatcagccgctccattttttgcacgtacatgacaataagataaatgaagaagattcccattgccaataaggctaaatacttgaggccaactgttaccgacttggcccacagcagagaaacaaggccatatataaaccaaaaggcgaaaaagagtaaaatcccttttacttgcagcccatgccatctttcaatatgggttcgattccgaaccatgccgaaaatatgaaggcaacccgctgcaatgagcagaagccggtaaaggaacaaactgaaaaatccaagatgaatagcgaaaaatgcattatttaaaaaagtgcaggcgatcaaaatatagattacagccataaagagccgttcttttgttgtaaatgcggttgcaagcgtcagtaaaaacaggccaattgccaacaccgcaagcacaacagccatctgcatgaaacctatatctttatggatggctcccagcaataggacgactccaaatatagcagcggccagtaacgctagcgtatggaccgctgatcgtttgatactcacatgtttaacccctttcctgatgtttcaggagccggcggccgagcctagcagccggcagcttcaaccaagtaacactttttctttttataaattgacgcttcccaagtctttagccaattcttcaagcggcaagcccggaaaatacttgtcagagggttccgttccccgaacagcgggacggccgatagagtgataaatgtatccggctgcctgcatctcttcaagtgaaaataaatttctgccgtcgatgatgactggctgttttaagaggttttttacttttacaagctccatttcttttacttccggccaatccgttaaaatcaggcatgcatcagtgtcttcaatcgcagcatacacatctgtgtaatactcgacctgttcgccaaggatcgctgaagcttcaggaatagcaatcggatcgtatgcttttacatgggcgcccagctgctgcagcattgggataatatcaagcgctggagcggatctcacatcgttcgtattcggtttgaaggctaatcccaggactgaaatggttctccctttgacgcttcccataacagtcaaaagtttatctacaatatgaacacgctgcttttcgttcgtttcaatgacagcttcgatgagcttgaatggatagcctgccgattttgcgatttgaagcagcgcggttgtatcctttggaaaacatgaaccgccgaatccaatacccgctttaaggaactttctgccgatacggctgtcaagaccaacaccatcagcaacttttgaaacgtctgcgccaactcgctcacaaatgtttgcgatatcgttgataaaggaaatctttgtcgccagaaatgcattcgcggcgtatttaatcatttctgcactttctaggtttgttttaatgacaggagcatggaatggctgatgaagttcctcaatgatggcagcggctttatgacttgttgaaccaatcacggcacgctccatattcatcgtgtcatgaatcgctgacccttcccgaaggaattcagggttagatacaacatcaaatgagtatctcccctttgaggctttttgaacgatagattgcaccagtttccctgttccaaccgggactgtgcttttatttacgatcactttgtagccgttaagatgctcaccgattgttttcgccgccgctttgacgtacgttaaatcagcttcacctgttttggacataggcgttccgactgcaatataaataatatctgaggcccgaatggcggacgggatatcgttcgtaaaggtcaggcgctgatccagcacatttttttcaactaagtctgcaagccctggttcatagattgggattaccccatttttcagacttctgatttttgattcatcgatatcacagcaaacaactttattgccgatctccgcaaagcaagtgcctgatacgagtcctacataacctgttccaatgacagctatttttttcacagcgctcatccctctcctgtaaaatgatcttcctatttatattggtcgcagtttcttacgattaaacggacgttttcgtgaccgtctgatactgatgatgcaaggccttggcgttttttcctgcgtcaaattgagcctgcacggtttcatacaagtcatctgctacttccggcttccatatttgctcatgttcgtaccgagtgatcgcttctgccaaggcttgagcggatttcggtttaatcagcagatgttggtgctttccgaacaaagacgacactccgccaacatccgtacagataacaggaacccttagcgccagcgcctcaatcacaacagtcggcatcccctcactgtaagaaggaagcacgaatagatctgccgcaagtaaatagtctcttacatgatgattcggcacttggcctgtgacgatatgccccttctgcgtcagcgtcgattttgcgggaccatccccgacaaagactgcctgaggtgggtcctgcagcgattcgatcgcttcagacagttcaaaaatgcctttctctctgaccagccggccgacatagacagccagacgctgatcaagcgggagtccgagtctttctctgatttcctctttcgtctcctcattctcctgaaaacggctgagctgtatgccaattggcaaaaccgagctgtcaaagcccgaaagctttttggcttcttcctgaagcttgtggctgactgctaaaacaactgacgcagaacctacggcacgcttgaaggctttaaacgctcctttgctgtaatgcggatagacattcacatcactgccatgcaaggtcaggacataaggaatttgcgctgactctgacacgactgccgcagccccgcccgatggcatggcaaaatgagcatggatcagatccggatataggccgcgctgtttcatggtttttaaaacggctgatgcgattctccgatgaggctgcgcccacttcagctggccgggaactgcccgatagaaaggccggtaaaccggtatcccctttctaacctcatactccggtctggcatccttttttcgatatgtctttttcagcatgcggacaggcgctgaatgaaaaggccgtgggcatatcacagtgatatcaagcccgagtttttgcagctcttgcacctgtgtctcatgaaacacaccctctccgggtttcatactgctcggatatacgcttgtgatccacaaaatcttcatgacaaacgtccttttcttagtagtttgcttttcgtttgagggtacgcttttaccaaaagaaagagatagcacagcgccccggccgcaactgaaatggccagccgcatttctgcctgcatactgaagtgttcggtactgaggcttacaccaaacgcgatgatgcccatcgccgcagtaatcagaaatggcttcataatcgactggaaataagctgaaaggttaagcttgatgacatatgccaaaagccagcgcccaatcaggaaattaacaacgctgataatggcatacacccatgcgactgtcagcaggcttcccgtctgtacagctgcaaacagtgataatccgtacagcagcagcacgccggaatcccaataaaacgctaagtcagctcttcctttagccagcagcacagatccatttggattcataagcactcttagtattccgacaatcgccagaacatttaggatcggaacagcagcaagccacttttctccgaaaaccgctgtgataaaggcgtctgacacagacacgagcccgattaaaagcggaaacgagacaagcgccagcatttttgtcatattcagaaagccttctctgatcacgctgttttcatatttgttttttgcgaaaacagggaatgccacccgtgtgacaatcggattgatcttcaaaaccggaatggtgacaatctgataagcgaggttataaatccccaatgcttcagcaccaataaaccggccgatcaaaatcatatcgatatttgctcccagcctgttcacaagacgggatgaaagctgaaatgctccaaaagaaaagaaatccttcatgcctctcaaatcaaaaacaaaagcaggatgccaattttttcggtatactgcccaatataaaatccctttactggactgcagcaggacttgagaaatcacgtacgccaaaatcgcatccatcataaaaaccgctatcgctaaatatccgaatgacaatacatttgaaaaaatctctattttgcttaacgtattaaaatgcagctgcttttgcagcatatactgatattgctgtccaattggcgcgatcaaaaacataatcgccagaatccgaactagaaacaccagctcttctctttgataaaatcccgcaatgacaggactgctcacatataaaagaacaaacagcaaaacgcccgtcataatgttaagccaatacaatgttgacagctggcgctccgtcgcgtcgtctctctgaattaatgctgctccaaaacccatatcgagcacaatctgggcgaaaactgtaaccgttgtgatcatgccgacaagcccaaattctgttaaggtcatcatatttccaagcagggcaaactgaacaatttgtatgattgtaatacacatggttgaaatacttgtccactttgcaccgctcatgatttgttttgtaatacttggcatcatattccctacttctttttaagctcagattgatggtgaataatggcattccgttttatcttgcaccatcacccgtccaaactactttacaagtttttaacataatttttaattctaaagtgaaagtcagattgcgaatgtaatataaatcaaatatcagcttttccttcggcgtcatatcgtaaccgccgttcacttgagcccagccgctcaatcccggtttaacagccagacgctgtgtaaagcctggaatctcattctggaatttttccgtaaatacgggccgttccggacgagggccaatcatactcatatcgcctttcagcacattaaacagctgaggaagctcgtcaattctcgttcttctgataaaagctccgatccttgtcactcgcggatcttgcttctgtgcccaaaccgccccagacttctcggcatctattttcatggaacgaagcttataaagcttaaatggtttcccgcctttccctacgcgttcctgcgtataaatggcaggtcccggcgtctccaaacaaatcaaaattgaaaataccgcaatcattggcagcgcaatcgccaacccaatgagcgcaaaccaaatatccattacgcgctttattgccaaataacgagccgtcttttcagataatgtaaaagaatgtatttgctgaactgagaattcacgactcacattcatgcttttctctgcactcactgacacacacctcacgatttgtttgggatgttatgatgacctatgccagtcagtttagcagacggatgttaattggatgtaaatggtatgttaagaagtgtgaattacgtgttttttctgataaatgttgttaatactcttttactattttatatacaagtcctatttgttttaatcatttcatataaaaaagagacaaatctgtgattagatttgtctctttcgattatctgtaataagatactgtgccgtcatgaatagcttgtgcagctttatctttataaaccgcttgcttcaatttacttgcatctgatgcattagtgataaaggcagtttcaactaaaacactcggcattttagaatatttaataacatagaaagcggctgtttttactccccggtctctcgttccaagattagccgctaactttggttgaatttgttcagccagtctcttgctatttgcagcttgatatgttgtatcgtagtacgtctcacttccatttggtgatgagctatcattagcatttgcatgtatactgataaataaatctgcttgtgcagaagctgctttatttactctctcctgtaaagaataaaaagtatcattagatcttgacagtactggaagagcacctgaagtatttagctttgtattgactcttttcgctatatcaaggttgacttctttctcaaggagtccattgccgattgctcctgaatcttgatcaccgtgacccggatcaataaagattgtttcacctacaactggattctttagctgattagcaaccttggtgcttacggcaggagtgtttccgataatcgtaaagtttgacatgtttttacttccaataattttacgggctcctgtagataaattttcaccatttgtaaggataagagattgcttcttcttagctgccagtgtagctcctgcaatagagtcagggtagctgaatccattgcttacatatacgatgcttgttgataaattaagtttttgtacgatatttgcagcaagctcatatctgtttgaaccactaattcttgtaggagaaggtaacttgttgtataccgtattgctgatacttccagtgcctcctacaacaacggtactcgaaattcccttatcttttatcacagacgttgtcgcactatttatagatgttttatttgtaaaaagaattggatacccgtttttcgctgcataaggaatgacggccggagcgtctgcatataagaagccattcaaaataacagcttttgaagtcgcacccatcgcttttgccacccgtgcagccgtatcataacggttgcttcctgcaattcgtttaatacttatccccaaacttttaatctggttagcagtgttagatgaaacagcaggtgttccgcctacaataattacatttttagtctgcatctctttcaatcttgttttcgtttcatatgaaagcttatcagaattagtgtaaagcaatggcgcattcttctggtaagcaaggggtgctgctgaaatagcatctgcataggaactcccaccaacaattacagctgtacttgctgttgaatacatttgctttgatatttgtacagcagtgccgtatctattgcttcccccgactcttttcactgaattatcggccaaagctgttggcacaaaaagtatgagccccagaaaacacattgttaggacttttatataagaacgcaattgatttcctccttaagtggcgttatatcctaaaataatcaataacttgtcagagttgtacctggatagtaaaatttcaaaattgaactatatgaatctccagcttctgctcttgcttttgctccatattgactcattccgatcccgtgaccatatcctttaccgctgattgtgtactttgaagtatctttttttacagtcacataagtacttttaaatacagtcgctccaatcattgttcttaactcacttgttggtacactaatggttgtaattttgctcaagttataggagccagtactgcttttaacaaaatacttcactttcatcgatgctgtttttgcacgctgcccttgtgtcgttccactaaagcttaaatcgtcaatacttgcaattttgacagaatcagcgcttgtttctttatttttcaagatccagttcttaactccggaaagtcttgcagaatcagtttcagtcgctgaagaccaccaagaagaaggcttcgttaagtccaaagatttcgtatctagctgttgttttgacaaagtaagcgtccagcctatttgaggatcctttgtatctttttttgcaatcaagtaaggtacacttgatgaccacacttcattactagcttctgtgtaaccaccattactggaagaataagctgcagttataagagatccattatatttcagaactttccccttcgtttgctctaccgctttattggtattcgaattccaactgtagccaccataaacttgaaaagcggttgtatcaggtacagtagttcctgtttttgttattgagtaggttcttgcagcgacagtctgtgctttaagagcctcaagtgaccagctagcaggcatttcattcggaattactccttttaagtaatcctcaaatggaatattctcatttaccggtcggatatatttagtagactcaatagagaaattaaccgtgccaagatactgctttccatcaagactaattctgtttgaagtagaatagttttctggtttaattcttagggagtttccgtaagttttgatgttttcaaggtttaattttccgctgttgatttttagattataggtgctaccgtcagctaaataaaattcatcagcaagtgaattctcaacttcagcagaaattgaactggtacttccaataaagtcgtatgcatatgtggctttatctttcgttatacttttagccgcagccggaacgctatcttgtttaataaataaaatttggctgtttttcttcgaggcaagcgaagcgcctatcagtacgtctgcatattttgtcccgttcgtcattacgactttatcagccttcaactttagttgcttaattatatttgccgtaagttcatatctggttgatccaggaatcctttgcacagttgaagtttttttaatttggttttctacactatcactgacgctaaatgaactgcctataatgatgacttgttttggcaaattataatccggaagcttgtctttctctgtaagcaaaatagggtatccgtgtgctgctgcatatggagcaatggctaaagcgtcttgaaatactcttccggttacaacgatcgctttatcatagctgcccatttgctttgcaatattttctgataagacatatctattttttccgcttatccttttcacagcgccatatgatttcagcttgttttctacatcttttgaaatgcttcgcgctcccccaatgattaaaatattatcagggttaaacttagcaatttgtctttcagtagtttttgttaacgtgtcaggctgagtaaataaaactggtgcgttcagttttttcgccaatggaataacaggcaatgcatcaataaaaatatctcggttcaccaatatcactgtattaggatttttccactggctgttggatgcaagagtcgcagtttcgtatcgtgaagcgcctgcaaaacgatccgtaacagcaacattatctccagttactttataaaatcctgttggcgatagactgatgctagatttatttccaatataatttgacaatttaactgagatgtttgagtctgctgcaaaagaaactgatggaatcaataataagattgcagcaagtgaacacactatcaatcgtttgcaagatttcaaaatttcaggttcctccctatatcttagttggcacgttcaatatcttttaacagaagctgaccctcatcatttttttcatatgtaatcgtgaccttatctccactgttaaacttatcaagatcacttgtcgattcttcagtgatatcaagactaaccggctcattatctactgttacttctattgtatgagtatcagctaaccctacataagtaccttcttttgtttcaatgttactgtctggcgatacatcttcaccttgactcttttgactattaaccccgcaacccgaaagaagcaatataaagaacagtaaagcaataaattttttcatttttttcacctcattatattttatcgtcaacctattttatattttaaagaaaaattaagaaacaatgaaacttttttttataaaaaacgactattttaggatttcattcttgtattaaatagagttgtatttattggaaatttaactcataatgaaagtaatttaacagacgaggtgcaaaggatgagaaacgaacgcagaaaaaagaaaaaaactttattactgacaattttaacgataatcggacttcttgtactcggaactggcggctatgcatactacttatggcataaagcagcttcaaccgtggcaagtattcatgaaagcattgataaatctaaaaagagggataaagaggtcagtatcaataaaaaagatcctttttccgtcttaatcatgggtgtggatgaacgcgacggcgataagggccgtgccgatacgctcatttatatgaccgttaacccaaaaacgaatacaaccgacatggtcagcattccgcgtgacacgtatacaaaaattatcggaaaaggcacaatggataaaatcaaccattcatacgctttcggcggcacgcagatgacggtagacactgttgagaacttcctcgatgtcccggttgattattttgtgaaagtgaacatggaaagctttagagacgttgttgatacacttggcggcattacagttaacagcacattcgcgttcagttatgacggttattcgttcggcaaaggagaaatcacgctgaacggaaaagaagcgctcgcttatacccggatgagaaaagaagatccgagaggcgacttcggacgccaggaccgccagcgccaagtcatccaaggtattattaataaaggcgctaatatttcttccatcacgaaattcggagatatgtttaaagttgttgaagataatgtgaaaacgaacttgaccttcgataacatgtgggatatccagtccgattacaaaggtgcgcgaaaacatattaaacagcacgaactaaaaggtacaggcacgaaaatcaatggaatttactactaccaagctgatgaaagcgccctttccgatattacaaaagagctgaaggacagcctcgaaaagtaaaacaaaaagaagcttcgcacaatgtgcaaagcttcttttttatttgcctgtaaatgaatccggttgttctttccggtacccgtaatgaaacagcaattcttccacaatccggcgggaagcctctccatctccatacggattagaagcctgggacattttcttgtactcatcaggatcagttaacagctgttttgccagctgataaatgttttcctcatccgtccctgcaagtttcaacgttcccgcttccactccttcaggccgttccgtcgtatcacgcagaacaagaaccggtttcccgagagatggggcttcctcctgcacgccgcccgaatctgtcaatataaaatgcgatttcgctgcaaagttatggaaatcaatcacctctaaaggttcaatcagatgcactctgtcagaatcaccaaaatgcttctgagccgcttcccggacaacaggattcaggtgcacagggtaaacgacttgtacatcttcaaattcctctacaattctgcggatggccttgaacatgttttccattggctcacccaaattttcccggcggtgagcggtcaagagaatcattttatcctcacccacctgatcgagaacaggatgtgagtaaccatccctaaccgttgtgttgagtgcgtcaatcgctgtattgcccgttacaaaaatagagtcggcctttttgttttcttttaataaattgtctttcgcctggcctgtcggagcaaaatgcaaatcagcaatcgcccctgtcatctgtcgattgagctcttccggaaacggggaatacttattccctgtacggagccccgcctccacatgaccgacagcaatttgatggtaaaaagcggctaggcttccggcaaacgtcgtcgtcgtatcaccatggacaagcacaatatcgggtttgatatctttaaacaactcatccaatcttacaagtgcgttagacgtaatctctgccagtgtctgccgctccttcataatgttcaaatcgaagtcaggcttgatgtgaaacgcatctaacacctgatcgagcatctgtctgtgctgtgcagttaccgttacataggaatctatttcaggatattttttcaattcaagcacaagcggtgccatcttgatcgcttcaggcctggtcccgaaaacggtcatcacttttagttttttcatatttgtcacctggttttctgctatagtaaataaattcatactacatattctacatgaaaatgcatcattttaaatcatttcattcttgattcaaataaaatgatataagttttaatattaaggataaagcttgtttaaaaatggtttatccgatatcataaaaatgtgtaaaaacatattgaaaagggtaaatagagaatagtttaaccataaattttttcgatcataaggaaggtgccttttaaatgaaaaaagtacgtaaagccataatccctgccgcaggtctcggaacgagattcttgccggctacgaaagcaatgccgaaagaaatgcttcctatcgttgataaacctaccattcaatacataattgaagaagctgttgaagccggtattgaagatattattatcgtaacaggaaaaagcaagcgtgcgattgaggatcattttgattactctcctgagcttgaaagaaacctagaagaaaaaggaaaaactgagctgcttgaaaaagtgaaaaaggcttctaacctggctgacattcactatatccgccaaaaagaacctaaaggtctcggacatgctgtctggtgcgcgcgcaactttatcggcgatgagccgtttgcggtactgcttggagacgatattgttcaggctgaaacaccagggttgcgccaattaatggatgaatatgaaaaaacactttcttctattatcggtgttcagcaggtgcctgaagaagaaacacaccgctacggcattattgacccgctgacaagtgaaggccgccgttatcaggtgaaaaacttcgttgaaaaaccgcctaaaggcacagcaccttctaatcttgccatcttaggccgttacgtattcacgcctgagattttcatgtatttagaggagcagcaggttggcgccggcggagaaattcagctcacagacgccattcaaaagctgaatgaaattcaaagagtgtttgcttacgattttgaaggcaagcgttatgatgttggtgaaaagctcggctttatcacaacaactctagaatttgcgatgcaggataaagagcttcgcgatcagctcgttccatttatggaaggtttactaaacaaagaagaaatctaaacataaaggctattggacattcatccaatagcctttttttatttcaacatcaaagtcaatgtatgctcttcattatcaactgcgaagacctgatcaacggcctgccgcaaaaattaataatcccagacaaacacactgattgtagagttaaacaaactaaatgaaaacataaatacaaacatgcagattaaatagtaaatatcttgtattcaatgcaagctaagtaaacaccacttgctaaaagaacaatgactaaacaaccagcattacaaaataattaaataaatttgaagcaattacaacagaaggcagtgaactgtcggaaagttcattttggctaccatattaatcccttttaatttaagagccaggccctcaaattcctctattcggtcggcatgtccaaatatatccatccatcatttttatgatttgcagaaatgttcattatctcaattttcacgtttaacccttcgtcgaagagttaactctatagacttatttttttaaactggtcaaaaaaatcagtgtaataatccattgtataatgcacataaaatttgccccatggatggttttcaaaggaattatagcttttatttttaaataaatctatcgcctcgatatcattgaagctatctaatacatatgcgtcaaatttattccaaatcttattataataatcaacatcaattactttgatgttccctccatttataagcaattttttctgatcttctttatcaaaaaagtgatgaacgtttcttgcactatttaagataattttggttttagggcaatttaatctgacgtagttatagaaaagattaaatttctgtttccatagtgcaaaataattttcaaaatgatcttctatattaaaactttgttttttattttgaattgtaaatttataataattcgttttagggagagtccatctgttatttgtaacaaactggttatctgaaatttctacgtagccaaaatgcacatctgcgaaaaagtccaaaatcaaaatgtctggctgaacagatttaatctcggttagaaagctattctcaaaatccgtctttaaagtgtttttttcatgattagacatgttctcattatcaataacaatgtagttaggtttactcattgttgaaataatggacgattggttttgggtcaatacacaatcaaaaaaatttttataatcagcattaaattgagagttaaagttatcacgtgtaacacaactaccataaacagctacttttttcatttctttattccctctttaatattagttcctagactaataatttgttgataaacacgtttacagttttctttatccgtatacttataaaattgatttactctatcaatatatttggcatccattatacaatcgttttccatacaatttatcagcttatcaactaaagcatctttatcagcaattacttctccaaaccccattgaattgtaatcaaaataccctttttccaagtgatttttttcgtattggaagtaaaaaacaggttttttaagataagcaaagtcaaatgcaacggatgaataatctgtaactaaaatcgcactattattgaaatgatctcgataactttcattaatgtccgcaatcctcactgaactatttttgttgaaatctttcaactgctgaacaatatttggatgcgggaagaatacgatctcgtatcctttttcattagcctcattaatgagtttagcatcatttaataaattattaagttcattaaaataaactgagtttttaaagagtggtgagtaatctcttttccctgtttgcggatttatttttcctactaaatgatttctccatgttggcataattaatatctttttatgattatgattaacaagcttatcaaatctaggaaatccagttagaattacttctctttttgaataattataatgaccattaattatagactcatactcaggttgagcggctgtgataaatagtctaatatttttcttatacttattaagccatcccgaaatatcatctttcgtaattccatgttgaagaaaaacaaagttaaatttaaataagtccttataatatttcctcatattcacaaacgggttgactacataatcatctgcatgtgaagagataatttcatcggcaagtaaatgtaaaaatttgtgcttaggtgacccgtatgcaacaactggtcctatttttttcagcctgttataatctggactatctttactgataataaaatattttttgatgccgtcattctgctgcattgcatattcaaataatgcttcagcattatcatctgccttgttgattctatccataaaaagccatactcttttatttttctttattttatagaggtgttccataatctttcttacatttgatgctttctcagcacctattttattaaaggtcttaaaacgtctttgagcccgcttttcttttgctctaataatctgatttttatcttttagaactactaaattattaagtttatgatcgaaataaatccctataccatttttggtatagaaatcaactatatgtttatccagcgggaataatcgtccaaagttaatttttacttttattagttttccatttgatgaaatcatcatttcaatattcgagttatttgcaagctcaccaactgggatatcaaccttaaagcccaggtactctttaactggcttatttaagcaatataagttgtgtactgttctatcaattttttcggcatgatatatcttgtcattgacacatgctttcacttctaattctgcggcatcaaataatgaaccaaaattaccttcaagggttaaaatccccttttcaatgcttaatagctccattgttatagcttcatatctcatagaattaattaatttctctttaaaatataaattcacattacgattcaaaaagatctttttaaatacattttttttatttcgatatttcaatttgattaaaaaatattttctgtgcaagtttagagatttttgttcaaagattatgtcgtcatctataaatgcaagtattctttctagcaagtcaaaaaactcttcaacttccttatccgtcaaaacatcagttctgtcttctatatttattctccactgcaagtcataggcaatcatatactgaatgtatcttggaacgtatcctaaagttgtaatactatgattaattaattctcgagagaaattcttcaaataatccacataccattttttatcatttttacctgtttgagttgcagatgacgcatcttctcttcgtcgataattatattgtccttctgacacaataccgtatacttggcgcttcattataattttagtcagccattcactatcttcagcgtaggccatatcttcattaaaaaagtgatttttaacagcttcttttttcacgaatgaacttggtgctgataattgaattcctgtatgttctttcaagatatgaactagcctagttttatcaaatttataatttaataagtgtggaccacttgttttaccaaacatcatcattggaatagaaactacatcgactttagaataattcttttcaaaaaaatcatatacttttaaaagggttgaaggggacaatgtatcatcaggatctaagaaattaatatatttacctttggcatattttaaaccctcattacgcgcactacttgctccgccattctccttatcgataaagactatattttctggatacgcttctttatactttaagcaaatttcccctgatgcatcaacacttccatcgttgactaaaatcaactgtatatgatgctcaaaatcaagtgcctgatcaattatgcttgttattgcttcatctaaaaattcttcaacattgtaaattgccattataatagaaaagaaaaaattcttttgttccaagtttttcaatctcctttaatttatttctttttactcaagggtattagattctaatcaacttttgaaatattctagttaaaacattaactttttgaagatcaattaaattgttgtctttttcaacaataaacctaaaaaaagtaactcctatcggaagttttaattgatatgaagaatattttctatccctaactgtggttccccaaataactatgttcttatgttcttgcttgtttattaattttgcttttctcaattttcttccataagagatataaacactatttttatcgttaatcacagactcttcattactcaaacttaccattagctcaattgaaaatttattgactttccatgaagtaataacgattttttcattttctagtttccctaattgaataagtctgttgacaggataaccccatcgtttaaatgaaatgagatactcttttaaatatgttttcatgttttgttttacaattaaattctcatctatatatttcaaaacgtgaaataattccttaaaaaactcactctgttctatcttatttagcacttcataaaccttgttattgtttttttgaaaaataaataattttaaatgattaagaattaaacattgaacataaggtataacttcgctgtactcttctaatgatcttttaaccatttcaccatatccatttgtaagtaaaaaagtatacctgttttttttagaccacgaagtgtctactagagaatcctcactttttctttttctatagaaatatttagcggcaggaataaggccatatttttgttctttaattaaaaacgtattaataaataaaacatcttcccaaaaatccattttttcattaaaagcaagaccaagacgttctattgctttttttcgaaaaaatgttccacctatgtgataatgaatagcagtgtaattatcagttatgtttacaatgctttcaccacttttaaatctataattaagtgagtgttctccatttttattatcgaagaaaaatagcggcagtaccgctaaattaatatcggtatgcttttcaaaaaactttaatacctcagcaatagcatttagtgagactttgtcatcagaatctataaaccctatatatttactattatcacaaacttttaatccattatttcttgccatactgacattcggttcatcttgataaataattttaatattattcggatatgcagttgcgtattgttcacatatgttttttgaattatctatgctattattttcaatcaatattatttctatgtttttttcaaaattaattgtctgatcaataatactgtcaatggcctctcttatatataatcccgaattataaacaggcattacaattgaaaacaacatctcaagtgctcctttaaaataataagtttttatccgagtagtcttccacaactttttttgaatgaatcatcttttccaactaacaaaattggtcataaaatgaagtaatgttttcatcctgtttatagtctcttgttttatgtatggattcaatttacttttatgttgttttaaaaagaggtcccggagcacacttttcaaaatcataataaaaatctcttagtttatctctataaaatttaatatcgggaacataacgcctttttaaaccgacataataagcaaatactgaagaatagtctgttattaatatatctgatattaagtataattctctaatatcattatgatcagaaaaatcataagcaaaacccatgtattcagttaagttaatattttcagatacaagatagtggacccttaaaataacaatatattcattacttaattggtctttaagactttctaaatccaacaccatattaaatttatatttacctttaacataaaatgagttatctctttttattttcagcattccttcattgctattttttttatataaaaaatcgttcctcggatagccctattcaataaacgtctttttaaactgaaacgcatttttaaaaattttcgtagagtaagcattaagggaaatgagataaccgcatttactgacttctataagaaagtttcttttatattattcagtcttcatgccgggcatatgtactttatccatgtcatttgcatttaggggagttccgtgcccagtgtgcacatatgtagtgtttctcggttttagaacctatagcggcaagtggctgtttgttatccaatattttgatgtagccaaatacaacagccatttgagagagattttttcaaataattctcatctgaatcatcaaataaatctttgtctcttttatctacactccaaaatatccatattcatatttattcttattttcctcaagatactcgaaaattgctcttggattacagctgaattgtttgcctgaatagctttcgaagatgagtaatctttcgtttctgggcaaaagcccaattattctaaaaataattgagtatacactgaccaatagtcttctatatttcattaaaatctttgatttcattttagactctttaaatatcaaagaattaaatacttatctcagcaaacaagaaaaaaagaagcaactgaatgattcaagcctcttttagttagtgcgtctataaactagccatgtgttttttgatttggtagttgaaatggcttttgttcttgaaaggtaaactttccagcagcttcatatgtccgtagtgaaataaatcaaatgttccgtacgttatcactttcttcatgagataacatcaccttccaactgagagtaccagaaaaaaaccaaaaactttaacaggttgtttatcatttcgacatattttttacgtaccattaataatgaacaataatagcataagttcctataaaagttaagactctttaaaaatgttaatcaccagcatttttttgtatcaccgttgtattgttgtatattttttgcaggtccaatatcttatctataccctttataacgagttttctttttcggaaaaatcgattcttttgtcgcgtttttaagtgaaacgttttctttctgcaacaccatttattttgtacgcccttctcatattaatacatcgtcaaaacatgaaggaattgtaatacgaatgttaaaagttcctaaagatttttgcggtaagatagagtaaaacacacttgtttttatagacatatagatgaaagaaaggttgatacgatacaaacgaaacctattaattaattagataaagaaaaaaccgagcttcttgagaaagtgaaaaaagcttctaatctggccgacattcactatatcctccaaaaagaacctaaaggtctcggacatgctgtctggttcgcgcccaactttatcggcgatgagccgttcgcagtcctgcttggagacgatattattcaggctgaaacaccagggttgcgccaattaatggatgaatatgaaaaaacactttcttctattatcggtgttcagcaggtgcctgaagaagaaacacaccgctacggcattattgacccgctgacaagtgaaggccgccgttatcaggtgaaaaacttcattgaaaaaccgcctaaagacacagcaccttctaatcttgccatcttaggccgttacgtattcacgcctgagattttcatgtatttagaggagcagcaggttggcgccggcggagaaattcagcttacagacgccattcaaaaactgaatgaaattcaaagagtgtttgcttacgattttgaaggcaagcgttatgatgttggtgaaaagctcggcttcatcacaacaactcttgaatttgcgatgcaggataaagagcttcgcgatcagctcgttccatttatggaaggtttactaaacaaagaagaaatctaaacaaaaaggctattggacattcatccaatagcctttttttatttcaacatcaaagtcagtgtatgctcttcattatcaactgcaaaaacctgatcatctgtattcacaagaaaacgcttcttgctgctgtcatacaatacatcgctatcacttaaggatagtgacgccgggttgataggagaaatgttatgaaaaataagctctgttgctttatcattctccagtacataactgattttttcataatcaaaattcagcgtttttctgccgtcagccttatttccttcagtataaccattcaatttcgattgaatgctggtgctgctgtctcctaggaatttcagaaagtattcataggaagatgctgcgttttgcgagacataagacgtaaatgcagtggcatgcaattcagcgtgtttcatgttagttgcaacagcgctctgtttcacataataagagtgcccgtcaaactttattttcgctgcttgtttgccttttgcagctaccgttacttttgtaccgaatggcagtgtaacgtcagccttctgtttcaaaccctgatccttataagcagccgctttttcatttgctataaacccttgcttattgattgcagttaagcgttcctctgacttgccctttgcatcgccatgatggttcttcacttcattttgcggaatagcgccaaacgaagcaattgtacgaagcggggcattaaagaacatcgttcccgccatgaagacagtcagaatagacaaaatagcaatttgaatggcattggccagtgatttcggctttttcttctttttgcggaaacgggcaaacgcttcaggatcttctttcttcctctcttctgtctgctcttttttatatgtctctttttcttttttcgatagcttattaaaccagtcaataaacgctttgtactctttcacaaccgtttttgtttcatcaaacatacgaagctcgccatagtgcatccaagcaacacggtcacacatcttttcaatctgaccgattgagtggctgacaaagaaaatcgtttttccttgctttttaaactcatttattctgtctacacacttctgataaaacgtttggtcccccacagaaagagcttcgtcaataattaaaatgtcaggatcaatatgcacggagatcgcgaaaccgagacgcgacttcatcccgctggaatagtttttaaccggctgattaataaaatcgccaatctcggcaaattcaacgatgctgtcatacatatcatcaatttctttattggttaaccccatcatcaaacacttgagccggacattgtcccggcccgttaattggttattcaaaccggcagcaatcgcaatcagcgacggctggccgttcatttcaatttcaccgctggtcggcggaataattttagccagcaggttagacatggtcgattttcctgacccgtttattcctacaaagccgattgtctccccttcatacacgtcaaaggagacattccgcacagcaaaaaaaccattatccttagccggaaaaaacaatcctttaatcttgtccgattgttttttatacaaatgatactgctttgaaacatttcgaaacgaaacttttagtttcatcgtaaaatctccttacgtattaaagaaagtcaacaaacttgtctctgaatttcatatgcaggatagaacctactaacaataaaaggaatgtgaacaaccaaaagtacagcgtgtacttcatgtcatggaaaaaccatgctccatctaagaagctgttccggaatccttcaataatatagaatagtggattcaacttcagaacaggcactaattcggggtggctttgaccgagtttcgcattaacatcccaaaaaattggcaacaagaaaaacaaaagtcttgttacggcctgcagcaaaaattgataatctctaatcagcacactgatcgttgagttaaacaaactaaacgaaaacataaaagcaatcatacagatgaagtaataaatatattgtaaccaatgcacactcgggaacacaccattaactaggagtacaatgatataaatcaccatcatgatcatataactaaataagttagatgcaattgccacggacggtagagaactaatcgggaagttcattttagccaccatattaatgcgcttaaatacactatttgatccatcaagtatagttggactgatgaaaaaccatgggattaatcctgccagcatccaaataataaaaggcacttcgcccgctccggttgtcacaggaccgccctttctaatccccataccaaatacgaaccagtaggccagcatttggataagcggatttaagaactgccataagacacctaaataattcatttgatatttagacttggtttcataagccgccaatcttaaaattaaaggaaatgacgttatttgctctctgagtatacgcaacaaatcattcattttttatcttccttagacttaattgtttttgggaatctttctgtttaaaatttgaaagcaccgctgattattgtaacagatcctgcattttttttcacttctcaacaagtatctaaaaagctgccgaaatatcgacagctatacattttataaaataacctaaattattcagctttaaatacagtattaacaaccttttcagatgaacgtcctgactctaaatagcaaaacttatcatagaaaggaccaaaagaaaccggaagcttataatcaggcgatgagatctgcttgatagcctcaatcgtttcttcagtagtttttaccaaaggaccaggagcttctttttcaaaatcaaagtagaaaccacgcaacttatcccggtaggtctcgatgtcagggacaaagaatagcattggccgttttaaatttgcaaaatcaaagaatactgaagaataatcagtaatcagcaaatcagaaaccatatacaattctcgaatatcctcataagcagaaaaatcatatgcaaatccttcaaaaggacctaaatcaaaattctcagctaccagataatgcattcttaagattacgatatattcatttccaagctcttgtctaagttgatgcaaatctaaatcgagatcgaacttataacgcccttttgcataaaactgatcatctctccatgtaggggcatataaaataacctttttatcacgaggaatatttaacctactctttatcaatgatattgtttcctcattattatcattatgaagaaaatcatttctaggatatccagattcaatcattgtcttgttaaactgaaacgcccgtgtaaagatctcagttgaataaccatttggggaaatcaagtaatcccaattagaagcttccttgataaaattccttttatattttttggtgtttgtaccaggcatatggacttcttccatatccattgcaagtctttttaaaggtgtgccatgccatgtttgtaaatatgttgtatgactaggtttcggaatccataatggaagccggctgttaacaacccaatactcagctcttgccatagcgaagagccattttaatgagaggcgattaatgtaaggaattcccttttcatcaaaaggcgctgaatattgtttatttacactccaatacattttatactcagggtggttttcccgcatatattcgtaaatcgctctcggattacaactgtattgtttcccattaaaactttcaaaaatgactgttttccttttaactggcattctgctagccatcatgaatagagatttgtatgttttagtgattaacttgtttctcatttttgtgatcttttttatttttgatactaatctcttcttctttcctttaataaagtatttaatccttgttttcaggctatagtcgtttactctgatacctagagtctgctttttctttttcttaaagacttcataacgaactggtgtgttgtttgttttaataatacttactaatccttttaatttgttttttcgatctcctaaaacaagagcagtgctgttgaactgaatatccgttccttcatcgtcattgcatatatactccataaaaagacgataaacataacgtttttcatttgagaaaggaatttctttcaaaggcactttcacttcaaaatcatacagttccggaacaaaaccatctgctctcatgttttccaggccatgtgtttttctttctagcttgattggaaatttttcctcaataggtgtttctccacccttttttaaaataaggttcaagttttttatccgatattgattttcggaactcaggtaccccgcataacctgttatgcttatttcttcagagctaatctcgatttgatcaaatctgatgattttggcctctcttttcaccttaatagaaaagttgcctttatcagttgtataaggtaaaatcaaaagttctgtggtttgatcgacatgaaaggcgcgctcaattgaatttacttcagcagaaagacgcttcaagagtggttcctgctccgcatcttcatatttttttcgaaattcgacataaaaatcatatgtttgtcccatttcaacaggcataggcaaaacatgagcatttatctcagttttatactctaatgagccagtgttttgaagcggaaattcagattccgttcctgaacgtctctctttcagctttaaaaataactggtaatcctctaaaaattggtgttctgaatcaattgagattaacaattcaagacttcctaaattgtttttcaagcttttcaaaatacatttaatcacagtgttttcaatcattacttttttctgctcctctgtataaaagctctttcctttttgcttccttttattagtgtcaactactaaggacattacccaaaatattaactctcttttatttccgtgaccctccaagagaaattgcctttaactgttgtatagggctctactctatagccattattagtatctatactgtttcctgacaattttgtttcttcactcgaaagtcttcgcattgttttaatatggccatttgcattgaaaacaatataaaaatcaataacttgggttttattagcagctatcttttcaatatttacatctttttcgagatcaattacaaacagttgatcattttgtaagtttgttgaaataatttcagccttattctttctgtccaagcccactaaacgtatttttttaatatcattatgatcaaaattctcaatgtcaatttctattttagttttatcaaaatcctcagtataggaactaatagaaggatctttttttccaacctttttagagaacttctctctttctattcgcacctcaatcatctgattaagagcaaaagcccaattttcaatatagttgggtcttgaatatttttcagccattttaaaagcttgttctgaaaatttttgatgagtactttcatctttcatcaaagagataatagcttgacccaatttctctatattatactgttcaatgacatatccatttgctccgtcagtaactaagctccttgctccgtaatcataatcgtatgttacaactggacatccattgctcagtgcctccatatttgatagaccgaacccttcaaaatgagaggttgaaatggttagccaagctttttgaaactctgagtcagggttatccgtatagcctttcaaaaagacattattctgcagtttggtatcttcaatttctttttttattttttcgaaatcttcacccgatccgaatatatcaagttttgcttcaggaatttctttcacgactaaactaaatgcttttactgcatgtatcagatttttcatagatgcaagtcttgaaataatgacagctttgtatttttcactcggcacattcaatacagcgggatcaagaggcttatcaattgtatgcggagtaaagaaaaacgtctcttgttcccctgaaatcaatttaaaatcttctagctgctcctcagttataaaaaagacagcatccaaattatacatctgactaaatacttctttatagcgacccttaatttgatatttattgctgccgtaatgcttgttatgaataattgctccataataggaagaaggtgattttttcactttaaagacatgtttgtcttgcggtctgctgtccactaaaaacaacttaggtttatcattttgtttttgcagatattctatccaatattgacgcagttccgattcatcttttacttttatctcaccctcaagggagtaccaaataatatgagataattgaacatctttttcttcattgttccatacatagagtttgtctaaatatacttgattttggtcattaatatattcctgcagatacatcttgtttagctgcacatcataatgagtaacgagaactaagtttccgttcttcgtatattcctctctctttatgagctggtttttatcattccaatagtcgacgtaccggatagtttctccatctccgtagtaaattacagacatttcattgttcttcttaccaaacaatctcgacacagtttttgcaaattttcccattccaacttgcttttttatctggtcaaggcctatcctttcttcgtatgatcttttcccatttgttctaacacttaaaaaatcatcgaatagattaataacacttgtgaattttttatcaatcttaccgttgctgtacaattcatcaatttttgaagacaactctaaatcaaaacgaaacgttaagaaaaaggtgttttggttacactcttctccaaataattttgaacgcaataataatgatttcgtcagaccgccataattacttggcagtccaccagagataaaataataatccatgtcaggaatttgttttatattagattcactcaccgcatgtaaagacaattttttactccctttcggcatctagaatatatgatcattgaaatttatatctacccggatactttagtcacaaaaatcaatgtaagcatcaaaaagtacttcttatttcaataagaagtactttaattagatattgaaccaatgatatcaggatcctaaattataaaccagcaatttcctctttgatctttgttgtagagatgccttctgttcttgggaggtaaacaacctcacactgatctttgagaaagtcaaatttaccttcccagtcatcccccataacaaaaacatcaatattatgatcaataatatcttgctttttttgctcccaattcttttcaggaattacttcgtccacatatcgaatggtttctaaaattaatttacggtgctcatagctgtgataagcttttttttgcttttgtaaattgaattcatccgttgaaatagcaacaactaaataatcaccaagctgctttgcacgctcaagcaatttaatgtgaccccaatgcagtaaatcaaaagttccatatgtgataacttttttcatttaaagaaacgctccttcctaatgttaaacactattaaaaacactactgacgttagcgattaaattctaaaaacctgtttgtattccttatatcgacatatttctcgtatgtcttcactgatcattaattatagcataccgcctaaaaaaggttaagtactcatgaggagaaaaacattccaaaatatgtaattacactcagactccattggcaccaaggtctgttgttcattcgttcattcaattgtaaaattggaaacatatttaaatttaatgtaaagataatgttaatcctttgttgaagatttatgttaaaatataaggtagcttgattttgcttttagaaactctcggtttttaactatataaatagaatcttaaaggaaggaggagccagacatgcaaacagagactattcacaatattccttatgttaacagtaacttaacatcatttatcgattacctagagaaacattatattgatcaaaagattggtgctgtcatttccacagtcaaccctgaaattgcatttgcagctattaaagatcgggactactttgatgtactatcttcttcaaacttcattttgcctgatgggatcggtgtagtcatgatgtcacgtttgactaacaacaggcttcagtcccgaatcgcaggttacgatgtttttaaagaacttctgggcgttgctaacaaaaagaaaaaacgcatatttctgtacggtgcgaagaaagatgttataaaaggtgttgtatccaaaatttcttctgaatacccaaacattaaaatcgcaggttattcagacggttatgttcaagatcgcaccctagtggcaaaacaaattgcaagagcaaatcctgacatggtattcgtagctttagggtatcctcatcaagagaaattcattcataactacagacacttgttccctaaagccgtatctataggtctaggaggaagctttgatgtatttagcggtaatgtcaaacgggccccttcctggatgatacgtttaaatttagaatggttctaccggttaatcttgaatccatggcgatggaaaagaatgcttagcatcccaaaatatgctttaacggttttaaaagaagaaaaaaacaaaaaaactttctatccaaagcctgaaaaagatcatacaaaacagatttaaaaacgaaaactttcaaataaatggatgataaaaatgaaaataagatcactactggcgaattgctatttgtattttttatcagcaatcgccttttttctgcaatgggtgaaacctgaaagcaaagtgaccctcctgatctcattcgaagcaaacgcaaaagcgattcttgaggaatatgaacaaggacaatactcttataaacttaacatcctgtatacccagcaggcctctgctattgccgagagcttcccgaatgtagatgcatatttattacaagaaaaaaaccctatccatctcattaaagctgtatacctaatgtttaacagtaaagtgatcataacagataattactttctattaacaagtgtgttaaataagcggaagcaaacgaaatgtatccaagtatggcacgcaaatggctcactcaaaaaatttggtttggaagacattacaaacatgcaacggacgaaaactgatattaaaaggttccaaaaagtatacagttcgtatgattatttaactgttggctcagaagagatggcaaatatcttcaagaaatcatttggaataaaggataaccaattattaaaaataggtgtacctttaacagacccttattaccgagaaaacaagaaaaaaatttcagatactctaaacatacaaagaaaaaaaataatcctctatgcaccgacgtttagagattataatatgcaatcaattcaattgccttttacagaagaacaattaattcatcagttaaaagaagaatatgttttatttgttaagctgcatcccgccattcagaacaatattgatattaaatattccagtgattatattaaagatgtttctaattatgccttgtttgatctactcatggctgcagacatattaatcactgactattcttctgttccctttgaattttcgattttaaataaacccattcttttttatacttatgatttaaaactttatcaacagaagcggggattggttgataattatctttccataatacctggaagagcctgctatgacagtgaatcattaataaatgaaattcaaaccccatttaattattccaaaataaaagttttttccgatagatggaataagtattctgatgggaattcaagccaaaatttattgaatttcatcgaaaatttaataagctaaatgatgacacttgttcaaaacagaacaagtgttcttttttctcttgactaccgaacgtatgtttgctttaatgtaattagttgcttatggcagcaaataataatagaggtggtaaatttatgagaaaaaaagaactgtttgatttcaccaacatcacaccaaaattatttactgaactacgtgtagcagacaaaaccgtacttcaatcattcaatttcgatgagaaaaaccaccaaatttatacaacccaagtcgcaagtggattaggaaaagacaacacccaaagctatcgcataactcgtctatctcttgaaggtttacaattagacagcatgctgttgaaacatggaggtcatggtacaaatattggaattgaaaatcttaatggcaccatttatatttggtctctatacgataaaccaaacgaaacagataaaagtgaattagtttgtttcccatataaagcaggcgcgactttagatgaaaattctaaagaacttcagcgattctcgaatatgcctttcgatcatagggttacacctgctcttgatatgaagaatagacagttggcaattagacaatacgatacaaaaaataataataataaacagtgggtgacaatctttaacctggacgatgcaatagcaaataaaaacaatcctctttatactattaacattcctgacgaacttcattatttacaaggtttctttttagatgacggttatttatattggtatacaggagatacaaacagcaaaagctatccgaatctcataactgtatttgattccgataataaaatagtgctgcaaaaagaaattactgttggcaaagacttgtccaccagatatgagaataacttccgtgaaccggaagggatctgtatgtacaccaatcctgaaactggggcaaaatcattaatggtgggaattacaagtggaaaagaaggaaatcgtataagcagaatttatgcataccattcttatgaaaacttcatgaatcatgtacctatgcttcgatcccctttattaaaaaccgtggggcaccaagatacacctccagaaagatttcaaccatttatgcaaaccttcattttagagtataatgctcaaaacaaaaaatggatggttccgacttcaggttatttaccatcttacacatcaaatttagtccgaaatattactatcaatgcagatggaaacttgcaagtcacattaaatgaacgctatattagtttactgcatcaatcgatagaaggagatttccgcttaaaacaaaaggatatccgaatgggatcctggtattttgctggcggagaaaaatcaaatgtgcttgaaataggttttatgaaagggagtacaaaaatcagacccgatgatgcagccatctcaaatgcttcaagaatgagtatttttatgattgttgcggacaagattgaggtgtgataaacaaataggctgtagctattaaatagctacagcctatttgcaactttctaagttttttatcgatattccggaacatcaaaataaagtgtatagccgtccagcaatgaatacaggctgtacatgcggtttacttgtttgtacgcccagccgatgtctgttgcgtattgatgtgtcgctgtagctgaccatctcattttgtacagtgtgtcctgattgtaagctgtgttgtggatatacgatgagcctatgaatttagctccgccgataatggccgcttcaggtgtgaaccagccctgctcgtacgcatatttggctccgtagtaattcggattgctgtcgtatgctccaattccatacatgttgtatacggtttttccgttataggttaatccattggctaaggcggatgtcccgtttcctgtttcaagaagagcgtgtgagattaaatacagttcgttgatgctatattgattggcggcatcgataaatgcctttgctctccctgtcaggatgcctttacccgcaagcactttctgattgacctcagtaacgctgaggcccgctgtctgtgacagcttgagaaattggaagtagtatttgctgtctctggtaaagttatttggatccacgtattgaactacttcatcactgcttgcgtttcgccagcccaaattgatcttagcccagccgtttatctgtccgatgattttcactttatcgccttttttaaattggccgatcacgtttgtcgggctgacttccggcgttgaccggatatttagtacatcagccgtaacggttgatgttgctatattaatgtacgtgagcgatacgtaagccgctccgtctgtttgcggacttactgtcatttgtttttggaccatatcacgaagcgagagattgtaatttgttttcatgatttgcgggccgtttttgatcttcacgatagatgatgtccatccgtataattgttttagcttcgttgatgccgcagcagctgtatcattgcctgtgaactgctcatttacgctgattttataaagcgtattgcttttcgttgtgtagctgggggttacacttttcgatttaagataggttaacccattattcaatgctgttttgctgctgagctgtgttgtcacgattttgtattgtgtatatgctgtctggcctgtttttgatgttgtgactgcgatatgattttgtttgaaaaatgttaaaacgcggtcaatctcttcttggctgataatagcttcagttgtgatttgatagctgctcgcagctgtctgaccggttttctggcttgctgctgatatatgattcgatttgaaaaacgtgagtgcctgattgactttcgtttgatcaagcagagattcggttgtgattttaaacgtgccagctatttgttttttgacggatttcgcagaagcactcagctgatttttctttaatatgttcaagccctttgtgacttttgcttgatctgatgtttcttctgagatgagctgatattgattttctgctgttgatccagctgctgtttttgcagcttttacttttttctgagcaaagaaggctgctgctttgtttgcttgctgctcgcctaaaatctttgccgtcgtgatttgataagctgcagacgttgtcgtttttttgacgctggatgacgtgtaatgccattttttctttttaaagaaagtgtctattttttggagctgctgttttgttatacccttcatattcacggtatatgatgtgctttttccaacctgttgataactcccggatacgccagtgtttttcttgatttggctgatggcgtcctttactgtactcagccctttgaaataagctgattggacattgtatgactcaacggttgttttttgattgatggacttgtagctgcctgtgatgccagtgctctgtttcagctgctgcaatagagttttggcattggcttcacctgaaatggcggcagttgtaaacgtataataggcttgccctttcactgtttcctttaatgatgcctgcagcccagattccttttggaaggcgtttttgatctgcgctgctctgctgtctcccacgattgtgccagactgaatggttgtgacagacaccgtgtgtgtgatgggctgatacgagcttttaatccccgtttgcttggccaggctctggataagcgccttgacttttgtctcatcagcaatgtctgatgtcatgacgttcatatagggctgagctgctccgtaagcttttacagcgccagccactcccgtctcctgtttcagctttgctaggatagtgttggcctgtttttctccggagatggcacctgacgagatggtgacatatggctgtttgcttccaacaggacttgacgttcctgtaatcgatgtctgtttggcgagtccgctcagtattgctttcgcttctgattcgctatgaatgcctgaggcggaaatttggtaggtcgttgttgtgcctgaagcctgataggatgcatcccagccagtatctttttccagtttggcgacagcttgtgaggcttggctttctgtactgaacgtattcgacggctctactttatatagtgagtagtcggtatacgcggctgcctgggcagaaccagacatggcaaaaaaggcaagggacgcggcggatagaagcataggtgcgattagtctctttttcattccttctcctctttcttattctatgagtatataaaactagtttatttatcggcacgcggttgcttcatttataggtgaatcacttccattttctaataaaaaaaaaacttaatctcgaagtgagattaagtctaaatatgagacacgataagggtacaaggtccttttatcgtaaaatcgggcatttgagccggcaaaataaagtgatcgccttttttgagcggacatgttttgtcctcatacatgagcaaaccgcttccttctatcacgctgcaaatcagaaaggattcatcctgagccatttcagcttcgccattgatgtcccatttataaaccgaaaaatattccccttggacaaatgttttaatggttattccttttctagattctgtcgattcatctatatacccgtccacatggggaaccgtggccgcattgaccgctttcgcaaaatgaagctctctcggacttccgttgctatcaagacggtcataatcgtacacccggtatgtggcatctgaattttgctgagtctctaaaacaagggcccccttgcacaatgcatgcagcgttccgctcggcacataataaaaatcacccggtttaattttgattcttcgcagcaggccctcccagtcaccgctgttgatcattgtgacaagttcggtttttgagcgggccgtatgcccgtaaatgatttctgcgttttccttacagtcgataatgtaccagcattccgtcttgccgagttctccctcttcgttttctccggcatagtaatcatcagggtgaactttaattgacgtatcttccttcacatccagcagctttgtcagaagcgggaaccgatccccctctacgccgccgaatacttcacggtgttcttcccaaagctcgatcaatgtctttcctttatacgggccatttgcaacagtgctcggtccttttggatgagcggaaatggcccagcattcccccgttgattctgaaggaatactgtatccaaatctatctcgtaaagcggttccgccccagattttttctttaaacacaggcgttagaaaaatcggtgattgcgtcatgatccgtacccctcccctgtaaataactgatcatcattttcccggtgcgcccctcttacaaacgcccgtataagctgtcttttttccgatgacaacatatgtacaaagcatcatcttttcattaccccttcaaagaaaacgcttcctatctattatatcacgtcgaaaagaagctttgtttcagccttttcctcgataagaataattctccttttttgatacaaattaataaaaaccgtcaatctgtttacgaaggagagaaactatgcaaatcgactctgatctccagaacaatttagacaaactgaaaaaaacattgggacaaaacgacgatatgatgttttatacatttgctttcggagatagcagacaaaaggcgtgtttactgtatattgacggtctgacagagaataaaatgctggcgcaatacgtcatttctcctttacaaaaagaggcgttagcccataaggaatgctcgattgaagacttatccgccttttttttcggctttcaccacagcgttgtttctacaatgaaagaaatagagcagctcgttttttcagggcaagccattttgctcgctgatggctatcgcggaggattagctttcgacaccaagtcagtcgcaacacgcagtcttgatgaaccctcctccgaagtcgtggaacgcggccctaaaataggatttattgaaaaactgcggacaaacacggcgcttttgcgtgaacggacgagtgatcctaatctcgtcatcaaagaaatgacactcggaaaaaggaccaaaaagaaaatcgctgtcgcttatattcaggatatcgccccagattatgtcgtcaaagaagtgtttaaaaggctgaaatcagtcaatatagataatttgccggaatcggggacgcttgaacagctgattgaagacgaaccattttcaattttccccacaatattaagcacagaacgaccggaccgggtcgaaagttctctattagaagggcgagtgtccatattagtggatggtacgccgtttgctttgattgtaccggctacggttgacgaatttattcattcgcccgatgattacagccagcgctggatcccaatgtcacttgtacgccttcttcgttattccagcatcctgatcaccatttatttgcccggtctgtatatttctctcgtttcttttcacaccgggctattgccgactagaatggccatttccattgcaggcagcaggcttaacgtaccattcccgccttttgtagaggcctttatcatgatctttacgatcgaattgattcgagaagccggattaagattgcctaagccgattggacagacaattggccttatcggcggcgttgtcatcggacaggcagctgttcaggcgcaaattgtcagtgcgcttatggtcattgtcgtttctgtcacagcactggcatcctttaccgttccttcatacgcctataactttccgctgcggatcattcggatcggggttatgataagtgcaacagcgcttggcatgtatggcgttataatggtttatctgtttgtgatcggccatctcatgcgcctgaaaagctttggacaggattacattatcccgatcatggcgcagcctggacaggatttgaaagacacagtcatccgtattcccacgatgtttttaaaaagaagaccgacacgaaacgatcccgaagataacatcagacaaaggtgatggctatgaggaaatcagagcataaactgacatttatgcagacgctcattatgatcagcagcacattgattggtgccggggtgctgacccttccccgctcagccgccgaaaccggcagtccgagcggatggctaatgatactgctccagggcgttatttttattatcatcgctctgctttttttgccttttcttcaaaaaaacagcggaaaaactctttttaagctcaacagcattgtagctggaacattcatcggctttctattgaatttatatatctgtctatatttcattgggattgtttgctttcaagctcggattttgggagaggttgtcggattctttttgttgaaaaatacgccaatggcagttgtggtgtttatatttcttgcagttgccatctatcatgtaggcggaggcgtttattcaattgcaaaagtatacgcttatatttttcctataacccttattatttttatgatgcttctgatgttcagctttcgcttgttccagcttgattttatccggccggtatttgaaggaggctatcaaagctttttctctttattcccaaaaacattattatatttctccggatttgaaatcattttttacctggtcccctttatgagagatccaaagcaagtgaaaaaggctgttgctctgggcatcgcgacttccacattgttctacagcattactttgctcattgtgattggctgtatgactgtggctgaggcaaaaacggtgacatggccgaccatttcccttattcacgcattagaggttccgggtatttttattgaacgatttgatttgttcttacagctgacctggacagtccagcaatttgcctgtatgctcggatcctttaaaggcgcccatatcgggttaacggaaatctttcatctgaaaaataaaaacaatgcatggctgctgactgcaatgctggctgcgacgtttttcataacgatgtatcccaaggacttgaatgacgtgttttattacgggacgcttcttggatatgctttcttaattgtgattacaattccattcttcgtctggtttttaagctggatacagaaaaaattagggagggggcagctacaatgaaaacagcaacaaaattctccgtcatgttttttatgctgctggtcctctgcgggtgctgggatgtcaaagatatcgagcaactatccttcgccagagggctggcgatcgatgagacagatgatcaccagtacaaactgacgtatcaaaaccttcttccccaaagcgaagacagccaagcatccggaaaacccgaatttgtcaatgtgacgtcccacgggaaaacgattctggaagcagtcagtgatgtatccatcaaggaccctcctgtttatagcgatcatttaaaagtcattcttctgggagaaaaactgatgaggaatcaaaatgtagaccaagtcctcaaccactttatccgagatgatgagctgcggcgaagcagctatttgatggcagccagagggaatgcagctgatgttctcacaaaaggaaaccccaatcagcagcagccgatgccctccgaaaaactgattgatttgacaactcacagcggatataacggtaagattatgataccgctgcgcatcggaagagcttctgtctactctcagaacgggtacagttatcttattcaagccgtgaaaaacgaaaagggaaaagccaagtatgacggagcaggcattatcaaaaggggcagcaataaactcgttgggtttctttcagctgatgaaacccaaacactgtcatgggtcatggggacgatccaaggcggtgtcatgccgacgacagataaaggacatccgattacgtttgaaatcaaaaagtcgaaaaccaaaattaagcctatcattgaaaacggaaagcctatctttcatatttctgttaaaacgaagggcatcctgacagaagaccaaaacccgaatgaaaactcctttagcaaaagttatttgcacaggctggaaaacatttttgaaaaaaagcttgaacgagatgtaaagcaggtaatggataaactgcagcacgagtataaaaccgatccggtctttttatcagaccacataaggattcaacaccctgactactggaataaagtaaaagggcattgggatgaaatattttctgagactgattttaagtacgatatttcttttaaaatcattaactttggcacggtgggaaagtaagcaatcaaaagggtgcgcatgatcgcgcacccttttttatgttccgacagtctgctgttttccggccgatcctccctgtccgtttttgtcccgtaaatcctgctcaatttcttcaaggctttttccctttgtctctgtcactttaaatcggacaaataagaacgccatgataccgatcgcggcataaatcaggaataaataactgattccgatcgcttccattaatattggataggttaatgaaacaatcagtgtcccaacgtgcaacattaaggtcgaaacaccggtcccgattcctctgacgtgaagcgggaacaattcaggaagcatcacccacacaaccggtccccagctgaccgcaaagacaacgataaacacgcctaaacaaatgacggtcgtccatgaggcagccggagtgttatcgaaaaagagatttactaaagcgagaacgatcaagctgatcaccatgcccgcattcccgaatagcagtaacggctttcttccaatcttgtcgataattttaatcgctactaatgtcatgagaacattgactgtgccgattccgaccgtgcctaaaatcgaagcggagtttccgaatccgacgtttgtaaaggtctttggcgcatagtagatgatcgtattcgttccgataaattgctgcaaaaaagcgagtcccaaacctgcaataagcgctgggcgcacccatggatcgaacagctccttcaggccgccttcatcctgcttttccgcttcttttatatcatgtatttcctgatcaatatcttttgtgccacgcaatttttcaagaatgttcttcgctttgctttcttcgccattcgtgaacagccagcgcgggctctccggcataaacaaaatgccaataagcaagagcaatgacggcacagcagccaatccaagcatccagcgccacgcttcggcatcggcaaatatgtaattgacaatgtaagaaagaaggatgccgaccgtgatcatcagctgattcagtgatgacagcgccccgcgtttatgttttggcgccagttcagataaataaaggggcacgattgtcgtcgatgttccgactgcaagtcccaaaatgatgcgaaacagcaccatgactcctgtatttggggccagtgccacaccaagaccgcctatacaaaacagcagcgcggctgccataattgctttttttcttccgaaacggtcagtcagcttgccggccgctcctgagcccaatatcgccccaaccagcaaggagctgacaacaagaccttctgtaaacgcgtttaagcctaactcctttttcataaataaaatagctccggaaatcactccggtatcatagccatataacgcgcctccaagagctccgaaaaaataaagccatatatttgactgctttttcataaagatgactccctttctccatcagctgcaatgacattgtctgtgggatttttttagaaatcttttagcctctttttccggccattaaacctttttattttgctgatcataagttttccaatcatttacttgtatttttttcaatgtcgccgaaacattttacctgctgcggcgtccaatataaggtgattcagtacatcatcgttatcaattttcaaaaacaagaacttataaatataggaatatttatcgaaaaatgtctttcgagtagttgccccatggcaaatagaatggtacgcttcaaatattaaagaaacgtgaggtattgatatatggaagaacgatcacagcgcagaaagaaaaaaagaaaactaaaaaaatgggtgaaagttgttgccggattaatggcttttttaatcattgcggcaggctctgtcggcgcctatgcttttgtaaagctgaacaatgcttctaaggaagctcacgtcagccttgcacgcggagaacaatctgtaaaacggatcaaagaatttgatcctggaaaagattctttttctgtattgctcttaggaattgatgccagggagaaaaacggcgagaccgtcgatcaggcaagaagtgacgcgaatgtgctggttacatttaatcggaaagaaaaaacagctaaaatgctgagcattccgcgtgacgcctatgtaaacatcccaggccacgggtatgataaattcacacatgctcacgcttacggcggcgttgacttaactgtgaaaacagttgaagaaatgctggatattccagtcgattatgtcgtagaaagcaatttcacggcttttgaagacgtcgtaaacgagttaaatggcgtcaaagtaactgtaaaaagcgataaagtcattcagcaaatcaaaaaagatacaaaaggtaaagtcgttcttcaaaaaggaacacatacgcttgatggggaagaagcgctcgcttacgtaagaacacgtaaagcggacagtgaccttttacggggacaaagacaaatggaagtgctgagcgccattatagataaatcaaaatcattaagctcaattccggcttatgatgatattgtggatacgatggggcaaaatttaaaaatgaacttatcccttaaagatgccatcggcctgttcccgttcatcacttcattgaaatcagttgagtctattcagctgacgggttatgattatgaacctgccggagtctattatttcaaattgaatcagcaaaagctgcaggaagttaaaaaagagctgcaaaacgatttaggtgtataatgaacgggatggcgattacgccatcccgttttacatatttccttgttgaaaattatcaaagtaacgtttagccttaatttatatggattatgtttcacaggcaagctgaacatactacacgaagcagcttcatttttaaggaggttcccctacatatgaaatgtattgcgattgatctagacggaacattactgaataaagaaagcgtcatttctgcggaaaacagagaggcgatcaagcgggccgttgatgccggcatcctcgtcaccatttgcacgggaagagcgacatttgatgtaaaagcgctgctggatgacttggacatccctatcattgcagctaatggcggtacgatccacgacacgggttaccgtttgatcagccggacattaatggatcaggaagccggtaaagcgattgctgattacttactttcaaaaaacatttactttgaggtatatacagatgaccatctgctttctccttttgacggcgaagctaagctgcacgcggagcttgacattctaaagagcgcaaacccaaacgagcagacggatgaattgtggcagggagccatgactcaattcaaacagtttggcattaaaccaatccctcatatcgaatcggtttttgacggcggtgaaaacatttataagcttctttgcttctcctttgatatggacaagctgaaacaagcgaaggaagaactgaagcatcataaaaaactggcgcaaacctcttcaggaaaacatattatcgaaatcctgccggcctcgtcaggaaaaggacgcgcgttaacaaagctggctgacctatacggaattgaaacacaggatatctatgcgatcggcgatagtccaaacgatttgtccatgtttgaagtcgccggacaccgaatcgccatggaaaatgcgattgatgaattaaaagaaaaaagcacctttgtcacaaaaagcaatgacgaaaatggtgtggcctactttatagaccagcttctttcaggacaatatgcataaagaaaagactccagagattggagtctttttcttttattgcacccgtatacttcctgcgtatttatccttccaatatgtgctcgtgttcatattggtgatggtcacgccgtttgataatgtaacgtgaacaacttgtccgtttccgatatagatggagggatttaagcttgttgattgaaagaacacaatgtctcccggcttcaggtccgccttctcaatcttagttccggcattgtactggcttattgcgtatcgaggcagggaaataccggctgctttctggtagacatattggacaaatccagctgtatcaaatcctgtctcaggtgttactccgccctgtttgtaaggcacttctccgacataaagcgtcgcttcggaaacaatcggattttctttcgggattgtcaggttgtcaaatcggcgaatacccgtcatcttcgatttccagtaatcctctgacaaataggaaatggttactttttctgaccggcttgcctgaatgaacctgcctgcgcccgcataaatgcctgcatgtgaaattcccgttttatacgtattgctgaaatagacgacatcaccaggctttatgttctgaggggctaccttctcgcccactgcccactgctgttcggctgatcgcggcagataaatgccgagtgcctgttgaaacacatattgcacaagccccgagcaatcaaagccctctgacggcgtgcttccgccaaacacatatgggacaccgatatatttttcggcctcctgaacgacaggaacatcagccgttgccggatcggcagcgattcgtctcgccccgatataagttccgctccaatagctgctttttttgtaattggtgatgataaccccttttgactgtgtactgtgaaccatttggccgtctccgatataaagggcgtcatgtgtcggaacagtgccggtgcttccctctttcttgaaaaacaaaatatcacccggcttcaggttttccggctttacagctgttccgattttatactggtcgtttacagatctcggcagatgaatatcagccttactgaacacatattgtatcaatcctgatggatcgaaaccctcttttggcgtttccccgccatatttatactgatatccaagcaggttttttgcttcactgacaatcaattctgatgatgtatcagcttccgcaatctccgcttttgtcataattggaaccaaaaaacaaatgataaccgccacaagcaaaaacttcttccagtttgccagtgtgttcacttttattatctcctcctctttttgcagttttaacatcggtatttttttgaatatgttaagagactttttaatatttttacagaatgaatatgctgggcaaataaaaagagagtgtctcctcagacactctcttttttgaattatttattggcgtttaccggttcttcctgctgctggattttattcatttccatatcaatcttctgtttttcctgatctgtcagctgatcattgaatttaaaagctgacataaacatgaacacgatggctacggcaacaaacggccagatggctttgacaaatttcatctttatcactccgtttatttagattttagtttgtcactatgatcaatatcaaacgtcagttttccgtcttctactttccaagcgaaattagagtctttcgtcagttcgcgaataatggttttctgtttaaggctgtcttttttcacaggtgcaggtgtcgcttcatggatatcgatcggtgtcacttcaaagcggcctgttccatttttcttcaggtgatactgaaccagtgcactgtctcttgttctcgtccagccttggtcaaagacaaagttgccgaggctgtagaaaatgacggttccgttatatacttcaatcggttctaagacgtgcggatgatggccgacgatgatgtcagctcccgcatcagacatggctcttgcaagctggcgctggcggtcgtttggatcattgtcatactcttggccccagtgtgactgcacaacaacgatgtccgcatgttttttcgcttctgaaatcatagggatgaagatttcaggatctgcgggcagcacgcccggcgtattctttttagccgcgaaacctttcccggacacatcggtaaagccaagcgttgcaattgttaccccgttgactttctggtacgaaattttctttttcgcatcacttaagctgtatcccgctccaacgatatcaaggttttgcttcgcaaattctccaagcgtatctttcatgccctgaacgccgtaatccattgcgtggttgtttgcgctgttgagaactgtgaaattcatgtccttcaagactttcactgattccttattcgtctgcagatgaatctctttatctgcttgtttataattcttttgataggttaccgggttttcaaagtttcctgctacataatccgaagctctaaagatcggttcaacatattgaaaaatactgtctgcccctttttgctccgttactttttcaacatagcgtcccatcataatatcgcctacaaatgaggctgaaagtacgtcgtcagaatacgttttgaccttcggcgtttccgcttttcccgcccacatgaaagcgaacataaggacaaaaacgatcggaatggcaataaatacgtgcttattggttttctttttttgctgttttgtcagctttagcagcttttcatgaaagctcagttcttttttcatcgtttgacacaccttacattaaattaagtagtaaacaaacatgatagcaaaggtcgctccgctcaatagcagcgtgcttccgaacgtaatggttaaaccttgtttctgaatggtattggcaattaaacctggcacgatgatgccgattcctcgaaattctgcgatttcaaatggtacaatcgggtatagaaaatcaaacgcgatttttaggacgatccctgttatcagcatggcagcgaattttctgcgtccgtacaaaatcataaatttggataaaccgtatttcacgataacataagtgagcaagctcactagcaaaacaagtaaaataaagaccggctgattaaacacaagtcctaaatatcccggtacaacaagtcctgccggcacgatccctgttttttccgcaaaaattaaactgagtagtacacctaaaattagtgcgatgtataaatctgatccgaacatgtttgcatttccccctagcttacgagctgcttaaccttgtattcgtggattttttcaattaaaggctctgcggcaccatgaatattgccgacgccatatatgacacggttgtgcattcttttctttaacaattccataatttcatctgttgacttatactctagatcatgcagtttgtctgcaggaattttgccttcttcgtaggcttttacgaccggttctgttgtttcaccgattaagatcagttcacttgcttcaatataaggcaatacgtcatttgcgaattgctgtgtccgatcgacacggtctgcgcggcagttcatgatgatgatcggatcatcggtcgggtaaccgatttcttttacacgtttccatatattcaaagtagaagaagcgtcgtttgcggcaaacccattaacaaagtgcccaggctcgctcggactgatcagcggaagaattctcattgctcccggatctggcggcgcattcagcattcccttaaatgctgtttcttcgtcaatgccgagtgcttgagccacacccagcgccagagaagcgttatcagggaataccatgtattcaaatttacgtaaatactcatctgtaatttttgagttatcagcaatgatgacttttgtgtttcgttcttttgctttttgtttaaagaactcggtatattcactatctgtaatgacaagatggccattataaggaattgtagcagtaaacgcttctgcaatttcatcaagcgtcggccccatgacatccatatggtcttccaaaacattcacaatgacgccgatattggcctgcagaagttcttcctgaaagatgatttgataatctgggttaacagccatgcattcactgacaatcgcgttagcccctctttctactgtttctctcatgacttctttttgctctccgatattcggcccctgaggtttccgtttaatcggcttttcctccggtgtgtcccagtaaatcattcttgcatctgttcctgttgtttttccaacagtcttgtaaccggcttctattaatattccggttgtcagccttgtcacagtcgattttccgcggatgccgttaatattcacccgaacagggagggcatcaatgtttttctgatgtcgtcgtttttctaatattccgatgaccagtatgacagcacaggctataatgagtaaccacattgcttttcgacatctccttctatattgttgtaaattcattcatcagtatatagaatcactatgaattctcaatcggcattatgtaacataatcttccctaatcgactaagccaaacttctcttttgaaagagattttatacctacaaactgttttctatttttggaaaacagcaggacttataccttatcacttttttaaaaaattgaagagaatgcgctttcatttttctcctgatatccttctggacgtatagtcacaccctgctgtttgtatttaatatgcatttcaaatcaatctttttttcagcctgtgttatcaagcatttcctgctatcatgcgtgtttccggttcttatgaacacaaaataattttatcctgtttcttaaggacaaggtcataatgtcatcctttctgcatggaataagcaatatgaggcccattccaaaatgactaaggaggttcgagatgaaaacgctaaacatacgagtccgaattctctaacataattaaacattttctgggatgatagtcttttctgtttctcaccatttacaggtctaaacgcatgactttgaaacaattttaataaaacttaatatttgttcaagaaatcttcatccatatttgtgaagactttgtcaaaaaaagagtgaaaaccttaaatttttcaattatatatacaatttacaagtagatttcttttgatatttttattgctaacttcggattgttcatgataatctatatatgtaaacggttacataaacaaggaggagctgttttggctacaattaaagatgtcgccggagcggcgggcgtttcagttgcgacggtttcccgcgtcctgaatgataatggctatgtacacgaagaaacgcgaacgcgtgtcatagcggcgatggcgaagctgaactattacccgaatgaagtcgccagatctctatataaaagagaatcccgactgatcggacttttgctcccggatatcacaaaccctttcttcccccagcttgcccgcggtgcggaggatgaattgaaccgggaaggctatcgtcttattttcggcaacagtgacgaggaattgaaaaaagaacttgaataccttcaaacctttaagcaaaatcatgtcgcaggcattattgccgcaacaaattacccggatctcgaggaatacagcggcatgaattatccagttgtttttctggacagaacactggaaggggctccttctgtgtccagtgacggctatacaggaggaaagttagccgcccaggctatcattcacggaaaaagccagcgcattacgctcttgagaggacccgctcacctgccgaccgctcaagaccgctttaacggcgctttggaaatcttaaagcaggctgaagttgattttcaggtcattgagacggcttcattttcaattaaagatgcacaatcaatggcgaaggagctgtttgccgcttatccagcgacagatggtgtgatcgcgagtaatgatattcaagccgctgccgttttacatgaagcattgcggcgcggaaaaaatgtgccggaggacattcaaattatcggctatgatgacattccgcaaagcggacttctgttcccgccactttctacaattaaacagcccgcatatgatatggggaaagaagctgccaaactgcttttgggtatcatcaaaaaacagccgctggcagaaacggcaattcaaatgcctgtcacctatataggaagaaagacgacaagaaaggaagattaagatgcgtaatatttgtgtgattggtagctgttctatggatttagtggtcacctcggacaaacgcccaaaagccggtgaaacggttcttggcacgtcatttcagactgtgccgggcggcaaaggagcaaatcaggccgttgccgcagccagacttggggcgcaagtgtttatggtcggcaaagttggagacgatcattatggaacagctattttgaataatctcaaagctaacggcgttcgcactgattatatggaaccggttacacatacggaaagcggaaccgctcatattgtgcttgctgaaggcgacaacagcattgtcgttgtcaaaggcgcgaacgatgacatcaccccagcgtatgcgttaaacgcgctcgaacagattgaaaaggtcgatatggtgctgattcagcaggaaatcccagaagaaacggttgatgaggtgtgcaaatactgccattctcacgatatcccgatcatactaaacccagcaccggcccgcccgctcaagcaggaaacaattgatcacgctacctatctgacgccgaatgaacacgaggcttcgattttattccctgatcttaccatttccgaagctctggcgctttatccggcaaagctctttattacggaaggaaaacaaggcgtccgctattcggctggcagcaaagaggtgctcatcccgtccttccctgtagaacccgttgatacaaccggagccggtgatacgtttaacgcagcatttgccgtggccctggctgagggaaaagacattgaagccgcattgcggtttgccaatcgtgccgcttccctttctgtctgctccttcggggcccaaggcggaatgccgacaagaaatgaagtagaggagctgctttcatgaaaaaacacggtatactgaacagccatcttgccaagattttagcagaccttggccacactgataaaattgtcatcgcggatgccggactgccggttcctgacggcgttttgaaaattgatctttcactgaagccgggtcttccggctttccaagatacagcggcagtgctcgctgatgagatggtcatcgaaaaagtcattgctgcagctgaaataaaagcatccaatcaggagaatgcgaaatttctagaaaatcttttctctgaacaagagattgaatacctttctcacgaggagtttaagctgctgacaaaagacgcaaaggcagtcataagaacaggagaatccacaccatatgccaactgcatcctgcaggcaggtgtacttttctagaaaggaggatgaaacatgcagattgaaatgaaagacattcataaagcattcggaaaaaatcaggtgctgtcaggcgtttcctttcagctcatgcctggcgaggttcacgcattaatgggagaaaacggcgccggcaagtccacgcttatgaacattttgacaggcctgcacaaatcggatcatggtcaaatcagcataaacggaaacgaaacgtatttttccaatccaaaagaagcggaacagcatggaatagcctttatccatcaggaactgaatatctggccggaaatgaccgttcttgagaatctatttatcggtaaggagatatcctccaagctgggcgttttacaaacaagaaaaatgaaagcgctagcaaaagaacaatttgacaaactctccgtctctctttctcttgatcaagaagccggcgaatgttccgtcggacagcagcaaatgatcgaaatcgcaaaagcgcttatgacaaatgccgaggtaatcattatggatgaaccgaccgcagcgttgactgaacgtgaaatcagcaagctctttgaggtcattacagcgttaaaaaagaacggcgtctccattgtctatatttcgcatcgcatggaagaaatttttgcgatttgcgacagaattaccatcatgcgtgacggaaaaacggtagatacaacaaacatctcagaaactgattttgatgaagtcgtcaaaaaaatggtcggacgggagctgactgaacgatatccaaaacgcactccttctctcggtgacaaagtattcgaggtgaaaaatgcctccgtaaaagggagttttgaggatgtcagcttttatgttcgttccggtgagatcgtcggtgtttcaggattaatgggagccggccggacagaaatgatgagagcgctgttcggcgttgacaggctggacacgggtgagatatggatcgctgggaaaaaaacggctattaagaacccgcaggaagccgtgaaaaaaggtctcggctttattacagagaatcgcaaggatgaagggcttctgctcgacacctcaatccgcgaaaatattgccctgcccaatctgtccagcttctcaccaaagggtctcattgatcataagcgggaggctgaatttgtcgatctgttaatcaaacgcctcactatcaaaacagcatcaccggaaacgcacgcacgccatttatcaggaggaaaccagcaaaaagtggtgatagccaagtggatcggcatcggaccgaaaatgcttatcttggatgagccaaccagaggtgtggatgttggcgccaaacgagagatttatacgctgatgaatgagctgaccgaacgcggcgtcgctatcatcatggtgtcatcagagctgcctgaaattctgggaatgagcgatcggattatcgttgtccatgaaggcagaatcagcggagaaatccatgcgcgagaagcaacacaagaacgaattatgacacttgccacgggagggcggtaatatgaaaacggaacaactgcaaacagaacaaaaacggattcacttcgacggagtcatgcaaaaactcggcccgtttcttggtttatttattctcgttatcattgtatctattttaaatcccagctttcttgaaccgctgaatattttaaacctgcttcgccaggtcgccattaacggattaatcgcgttcgggatgacctttgtcattttgacaggcggcattgatctttctgttggcgctattcttgccctgtccagtgctttagttgcggggatgattgtgtccggtgtcgatccggttctcgcgatcatccttggctgtatcattggtgccgtactaggcatgatcaacggattattgattactaaaggaaaaatggcgccctttatcgccacgcttgcgaccatgactgtgtttcgcggactgacgctagtgtatacagatggaaatccgattaccggacttggcacaaactacgcttttcagatgttcggacgcggttactttttaggcattcctgtaccggcaattacgatggttcttgcctttgtcatcctttgggtgcttcttcataaaacaccattcggacgccgaacgtacgctatcggcggcaacgaaaaagccgcgctcatttcaggcatcaaagtgacgcgcgtgaaagtgatgatctattctttagccgggcttttatccgctcttggaggtgccatattgacttcccgcctgcattcggcccagccgactgcgggagaatcgtacgaacttgatgctatcgcggcagtcgtcttaggagggacaagtctttctggcggccgcggacgcattgtcggcactttgatcggggtcctgatcatcggcacacttaataacgggcttaatctgcttggcgtttcatcattttaccagctggttgtcaaagggattgttatcttaattgcggtattattagaccgcaagaagtcagcttaggagggttttcacatgaaaaaggctgtatccgtcattttaacgttatcattatttttgttaactgcctgttcgcttgagcctccccaatgggcaaagccgtcaaactcggggaacaaaaaggaattcaccattggcttgtccgtctcaacacttaataatcctttttttgtctcattaaaaaagggtatcgaaaaagaagctaaaaaacggggaatgaaagtcatcattgttgatgcacaaaatgattcatcgaaacagacgagtgacgtggaagatttaattcagcaaggtgttgatgcattattaatcaacccgactgattcttcggcgatctcaacggcagtagaatctgcaaacgcagtcggtgtgcccgtcgtaacaatcgatcgatctgccgaacaaggaaaagttgaaaccctcgttgcttccgataatgtaaaaggcggtgaaatggccgcgacgtttattgccgacaaacttggaaaaggagcaaaggtggcagagcttgaaggcgtccccggcgcatctgccacacgggaacgcggctcaggattccataacatcgcagaccaaaagctccaagttgtcacaaaacaatcagctgactttgaccgcacgaaaggcctgactgtcatggaaaacctgctgcagggacatcctgatatccaagctgtttttgctcacaacgatgaaatggcgctcggtgctctcgaggcaattaacagctcggggaaagacatattggtgatcggttttgacggcaataaagatgcgctcgcttccattaaaaacggaaagctgtcagccaccgtcgctcagcagcctgaattaatcggtaaattggctacagaagcagcagatgatattttgcacgggaaaaaagtgcaaaaaacaatatccgcgcctctcaaactagaaacacaaaaataattgtctgatgtttaggaacctgcgataacgtgaatagagatatagaatgaattatttctcttacgtgaggagaggaacggcatgaacaaaccaacaaaactattttcaacattagcacttgcggctggaatgactgcggcggctgctggcggcgctggcacgatccatgctcaacagccagaaacaacggtaagcattgatgatttatacagttatccgattgattcttatttggtatcagcagaggctctaaatgtcagaacgaaggcttccgcatcaagccaaaaagccgatacgctgcacttaggagatagcctaaagctgatttccttctcaaatgctgactgggcaaaggttcagtataaaaatggaaaaacaggatttgtatccactcattacattgttaaagcagcgacaacggtaaaaaccaaaacaaaaacaaaagtatatacatccgctgacggaaagagcattaagactcttccagcagacacaagcgtttcttttttaggctggagtaaaacgaataaaggcggttttgattttgattgggtattcgttgattacggcggtgcgacaggttatatgaaaacaaaggatttacacatgacaaaataactgagagggattccgcatttatgcggaatcccttttattatgaattgatttgtcacattcccaagatatttctcaggaaatattgtcgtatgctgtgtcgaaaccttacatgatcatcaacatttttgttcacgctaaaaagcggaggtgtaaatatggatcaatttgaagcagcatatgaatcgtataaagcccggcaaacaactgtcgatcaagaaaatgttccatctggaaaagaagaaattattgcggttagaagaaatgaggaagacaatattatcgcagtgaaaaccaatacaggaagagagctcgactatcctactgcgctgtcagaagcaaaatcaggaaaactcgctcatgttgatgtcttccataaatacgggcgtgacattttgcgaagtgaaccggacggcatcaaggaaaataatctgtctgagctgccggatttttaaacaaatacagccctgccgtatgttcgacagggctttcttttaaacaaaaggctgctgaatgtattcggctaaccgttttgcactgtgtgaaatatcctctgcagctgcataattcacgccatagaacacatatggaggcagatacttcatgccgatcagattactcgtggcctgaaatggtttcaatagctcactgatcgagtaatgatttgctccgcccgcttgatatttttccgcttcgctccctgttgatacagccagcatcagctccttgccatgcaaggcatttccttctgaaccaaaagcccagccataagtcagcacaagatcctgccattttttcaagagcggcggagagctgtaccaatatagcgggaattgaaagacaatccgatcgtattcctcgcacagctgctgttccttcgcaacatctatcgcttcatccgggtattccttataaagatcccgtactgtgatattgtcatgtttactcaattcctcagcccacgccttattaacaactgaggtctccatatgaggatgcactgccaaaaccaatattttcatcagaccacacctttactgttttgatgttattttatctaaaatcaggaaaagagccaaataaaaagaaagccctgctaaaaggggctttctttttttcttttattcagggcttccttcagttgtttcgatatctttcgcaaaatcagggttatccagattcgcattaaagaaatccgctgtgttcggaagtctgagattcatgttcattttttgagaaatcgtaaccgtgcaatcctcaagcacatagtcaaaaacgtgtccgcctgaattgcgtccttcgtcaatgaagtgcaggtgatagccagaaacggcgattccgtttgcataagctggtgtcaagaaacctacaatcgttcctctcacgttgtcgaagttgaaaatcggctgtgttttaaccgcttcaaccattggcacgtaaggtttttcttgaagttctactgttcttgtctgcacctttttaaacaatccgtcaatgcgaattgcataaaataagtttctgcttggcagcatgctgttgatctctttttcaaagtcttcgcgtgtcattttcgcatcaattttgtgcgtcatgtccggtgtaaagaacgtaaatgaacagaacggtgaacggtctccattttggaccggtgtcgcggttccgtctgagcgaagacggtaaaattcgccgtcaaacccaatcagctctccgtcaagcttgttaaaggttccgataccgaagtctccatatttcggaatctctgacagttcaaaatctccgtcatatactccgtctaatagagaagtcattgttgatacttgataaatctggctcacaggctgatctttttgaccacggctgagcacttgaatgttgctttctcgtttcatatttcccttcactccttttatttagtgctgttcataaaacagtgtcgtgatgcgcagagtgctagagagcttttgttttcataagttccccgaattctttcggaagcttgtcacttgctaaattaatgttatcactgtagtcaaccgggacatcgatgatgacaggaccttcagcgttcatgccttgacgcagaacatctgccagctggtctggtgattctacgcgcaagccagttgctccgaagctttccgcatatttcacgatatcgatatttccgaaatcgaccgcagatgtacggttatattttttcaattgctggaatgcaaccatgtcatatgtgctgtcgttccatacaatgtgtacaattggtgcttttagtcgaactgctgtctctaattccattgctgagaataagaaaccgccgtcaccagagacagaaaccactttttctcccggtttcaccaatgaagcgccgattgcccaaggaagcgcaacgccgagtgtttgcataccgttactgatcattaatgttaacggctcgtagctgcggaaataacgtgacatccaaatggcgtgcgaaccgatatcgcaagttactgtaacatgatcatcgactgcattacgcaactctttaacgatttcaagagggtgcgctctgtctgatttccaatctgcaggcacctgctcaccttcatgcatatattgttttaaatcagaaaggattttctgctcacgctctgcaaattctactttcacagcatcgtgttcgatatgattgatcgtggacggaatgtcaccgatcaattcaagatcaggctggtaagcatgatcaatgtcagcgataatctcgtctaaatggataattgtccggtctccattgacattccagaatttcggatcatattcaatcgggtcatagccgatcgtcagaacaacatctgcctgctctagcagtaaatcgccaggctggttgcggaacaaaccgatacggccaaaatactgatcctctaaatctctagaaagggtaccggcagcttgatatgtttcaacaaatggaagctgaacctttttcaaaagcttgcgaaccgctttaattgcttccggtcttccgcctttcatgccgaccaaaacgacaggaagttttgctgtttggatttttgctatggccgcactgattgcatcatctgctgcaggaccgagttttggcgctgcaacagcacgcacgtttttcgtatttgtgacttcattcacaacatcttgcggaaagctcacaaaagcggccccagcctgccctgctgacgctattctaaatgcatttgtaacagcttccggtatattttttacatcttgaacttctacactgtattttgtaatcggctggaatagcgccgcattatccaaagattgatgtgtccgttttaaacgatctgcacggatcacgtttccagcaagcgcaacgacagggtctccttcagtgttcgctgtcagcagacctgttgccaagttagaggcacccggtcctgatgtgactaacacgactcccggttttccagttaaacggccgactgcttgggccatgaatgctgcgttttgttcgtgccgggcaacgataatttcaggtcctttatcttgtaaagcgtcaaataccgcatcaatttttgcacctggaatgccaaatacatgtgtgacaccttgctccactaagcaatcaacaacaagctccgcccctctgtttttcacaagggatttttgttcttttgttgcttttgtcaacaccctcactccttattatgcattttaaacgtaaaattttaaatatcttgtgataagtttcactatacactctttggaaattgacctccaatatcgattcgccttatgattaatatgtaatacgaattattaacctatggaaaggaatgcatattgaatggagcttcgccatcttcaatactttatcgcagtagccgaagagcttcatttcggaaaggctgcccggcggctgaacatgacgcagcctcctctcagccagcagatcaaacagctggaggaagaagtcggagttacgcttctgaaaaggacaaaacgatttgtcgagcttaccgcagcaggagaaatctttttaaatcattgccgcatggcattgatgcaaatcggacaaggaattgaactggcacagcggacggcccgcggcgagcaaggccttctcgtaatcggttttgtcggatcagctacatatgaatttctgccgccgattgtccgggaatatcgtaaaaaattcccatctgtgaaaatagaactgcgtgaaatatcctcgtctaggcagcaggaggagctactaaagggcaacattgatattggtatacttcatcctcccttacagcatacagctttacatatcgaaaccgcccaaagcagcccttgtgttttagctttgcctaagcaacacccattgacttctaaggaatcaattacgattgaggatttaagagatgaaccaattattactgttgctaaagaagcatggcctactctatacatggattttattcagttctgtgaacaagcgggcttcagacccaacattgtccaggaagccacagaatatcaaatggtgattggtttagtcagtgccggaattggtatgacatttgttccttcctcagccaaaaaattatttaatttggatgttacttatcgaaaaatggaccaaatacagcttaatgcagaatgggttatcgcttaccgcaaagacaatcataatccgcttataaagcattttattcatatttcaaattgtcagcagacaagaactaaagagagtgatgcaggtacatgaacaatacttgcaatctcttttttcttttgggattcttatggaatttttattaatttaatataatcgcttagtacaactttatatcagtatacgtatacatacagtacaaatagttggcaaggacatcagtaagcgcaggacattagtttgattttaaaaatgaaagatagagaggtgaagtaaattattgagttcaccggcatattcacattgctcgcttttttcgtaacaatgatttttattttctggagaccaaaaggactaaatgaagctatccccgccacatttggcgctttaatggttttattgtgcggaagtgtgtcattggcagacttaggggaaatcggaacaaaagtcacgggtgcatcggttacaatccttgccactatgattatggccattgcactagaaagctttggtttcttttattgggtggctgcaaaactgctccaacaatccaagggttcaggcatcaagcttttttggctaaccaatttgctctgctttctcatgaccattttcctgaataatgatgggagcattttgatcacaactccaatccttttgcttgtactaaaatatttaggtttaaaaaaacatcaaaaagccccatatttattaagcggtgttttaatagccacagcctctagcgcaccgattggcgtaagtaatattgttaatttaatttctctcaaaatcattggaatggatctatatcttcacaccgccatgatgtttgtccctagtatgatgggactcatttttatgacttgtctactgtttatgttcttttataaacgtcttcccaagaacctgccagatataccgggccattttcagtctctgcggcatagaaggtaccatcctcttcattcgccatcagctcctttaccagaacgaaatcaaacaaaaatcatgttgtttgtgcttgcatttgtttttctcgtcagaatgagtctatttgcagcatcatataccggtatttctgttcctctagtcgctgtcatcggatcttttatcctgttgagctggagatggatttatttcaaaacctccccaagagacttgttatataaatcgccttggcacatttttatattcgcttttactatgtatgtcttaatttatggtctgcataatattggattcacagagttacttgtgaattattttgaacctgtggtttctggaagcctcgcccatgcaactttcgcatcaggtatctctacttcagttttttctaatctctttaacaaccatccagcgttaatgatcagtacttttaccttaactgaaatgaccctgaatccttcaacaacaaaaatcatctacttggccaatattatcggcagtgatatcggttcattattattacctatgggaaccttagcaacgcttatttggatgcatatattaaaacagtatgatgaaagtatttcatggggcgaatatataaaaacgaccattatcatcattccgctgactgttctttttacgttaacatgtttatatttttggatcagttggttatttctttagcacagtatgaaacgaaaaactgccttctgctattcaagagggcagttttgcatacactagggaagatgcattgtctttagatgatttaacttccaaatgattggctctccatttgcgttaataagctcaatgatattattagagacatcctttaatagaccaactttttctggcacctctcccatatcaaatatgaccaattcaccaatattttttttgatctgctcctcaaaattacgcacaagaggaactttggaaggcatgacaggcaattgtgagttgtcaagagtgtacggtgtttgttcagttgaataaggggtaaaccattttaaatgatgcatagatataaaaagtattttaaatacaggtgagaaaaatacaatataatcgtttaaaacatttgtaacatacccatggatcgatcgacccccagttacataaacttcaataaactggcctttgaccttgtttaatgtatttctatatgaaaaagcttgagtttctgcctctatggatggatcttccggattgatcaaaaatggcttctcagtactggtcattattttcgccttgtttatttgatgaagatgcaacaagggaatataaagataattgcagccatcaaaaataacaaaaatatcctgtccgatatctatgagggtgccgacaaaccttgtatctcctgaaatgacaacctcaacatctgtgttaaggaattgattcaaacctttcacgattctcctcctttaactgaaaaagggcatcacttaatctgatgctcctccattatctattaaaatttacgtttccagtgatagtctatcgttctgacaatcgtttcatagctataatcatccttttgtttttctgaacttttgaaggaacttgaataacctggtgatcttgatgattgataatctgatgatcttggtgatcgtttagatgattttgatgattgataatctgaagattttaatgatcgtttagatgattttgaagaactttttgaacgtgacgaacggccagatttggatgattgataatccgaagattttagtgatcgtttagatgattttgaagaactttttgaacgtgacgaacgaccagatttggatgattgataatctgaagattttagtgatcgtttagatgattttgatgagctatatgattttgaagaaatgaacgaattgctgtccttatcattattgtcttcctggctttgttcatttttttgatcctcttttttgtacgacccttttggtcctaagctgatgctttttatgtgaaaaggatagatgcgaagcacctcttgatttttcactatagtataatggccgtcggcattatctacaaggataccctcaatggcttccggacctccacgattaattgaaacccatttatgagtcagactcttaaaaacctcgcttaaatcatcagcttccaaaactccaactggcgtctgctcttctattttcaaatcaggctcgtgtttacttatacttttgatgtgatggatattaaaatacactaccccatcctcatttgtgtttaacgcagcgtaatcatctcccagccagaccaatcttccttttttagattccggacccccttggttaaattgaactgattggtttattaaatgtccgattaagctatgaaaatcatcagcatcgagcatttcctcagtctcaattgtcgtggtgctattattggtatcctcagtaatacttttcacatgctccaactgataataaattatttttttttcagcttgtaaagctatataatctgattttacagctgttaattttccttttttagattccggacctccacgatatacagtaacaattttatctttcattgagtgcaaaaagttataatacgatatttcattatttgaatgatatttcattctcctcttgctcattcaaattcctcctagtcacttatacatagatgataaacatactgcatatatacgtgtcacatttatttgttgaactaattcaatagcctaattgtcgctttttccgcgaatacccattttcacgcattcataaaatacttaaatgatctttgaggtattgtgaacggtttttaatatactcgcagatcacatccggctcacggtcaaaacgctcaacatcattctttttatatgggtccatcaagataaaaggcctaatccgttcatacatcgccatgattttcggttccatatattctattgtaaaaagagattggagcgttttttctaacaggcgcttgtaggacttgcgaaactcggattcatccaatatccgggcggttagtgtattaaatccttgaattcttacataatcggcagccatccgctctccatggatatccctgccccaagtcgcatcataatcccaaggaatcacctcaaataatccggtttccccgcttctgtataatgcgtagttgtggacaaacccgtcatagtttgaggtgaatacaataccggcaagccagcgcaaatacttgtcgacatccacgtgttttgtcacttctgacttaaactgagctttagggaccgtattaattttaaaaatcatatcctgtaaataaaaatcatcctcctcagtccctgttttcttttcatatccaagctccagcgatgttttcgtttccctttctaaatcgctcatcagagaaaagttggcatcatcatccaccgcataaaaaatcgcgccatcagccagcttccttttcgccaaataatattcatctacggattcaagttcaagataaaccccttcattcttcccattcatctttacaaacacaaactctgcctttggagacagtgtccctagctccgagaaaaaatccagagacaatttgtttctcatcaaggaaggatctttatactccgcatttaagtgaatctctcgcgcgccgcggaatgttttcggctgataaaaggaaatatggtatgacttctttttgaagtctctgatatgtgatccccgataagcaatatcaatatccagccttttttgatttaccttcatcacagctggcaccggatcatcgtcccatatatccttttttaattcacgcaagtcttttggatgaacaaacagctgataaagcggtaaattggattgattcttcatccataatcctccttacaaattttaggcttttatttttataagatctcagcggaacacttatacactttttaaaaccgcgcgtactatgagggtagtaaggatcttcatccttaacatatttttaaaaggaggatttcaaattgggccactattcccattctgacatcgaagaagcggtgaaatccgcaaaaaaagaaggtttaaaggattatttataccaagagcctcatggaaaaaaacgcagtcataaaaagtcgcaccgcactcacaaaaaatctcgcagccataaaaaatcatactgctctcacaaaaaatctcgcagtcacaaaaaatcattctgttctcacaaaaaatctcgcagccacaaaaaatcatactgctctcacaagaaatcacgcagccacaaaaaatcgtaccgttctcacaaaaaatctcgcagctataaaaaatcttaccgttcttacaaaaaatctcgcagctataaaaaatcttgccgttcttacaaaaaatcgcgcagctacaaaaagtcatactgttctcacaagaaaaaatctcgcagctataaaaagtcatgccgcacacacaaaaaatcttatcgttcccataagaaatactacaaaaaaccgtaccaccactgcgacgactacaaaagacacgatgattatgacagcaaaaaagaatactggaaagacggcaattgctgggtagtcaaaaagaaatacaaataatctaagttttcattgtttcaataggctgccggcggaggtacggaagcctatttttttatttgccctgtattagatatatgtcatgacataacatatgcaacccgcatcatttggtttcctttaaaccatttcgttataatcaaggtatcctaacgataaaggcggttgttgctatgtacatatttcaagctgatcagcttagtgccaaagacacatacaagctattgtcaggtaccgttattccccgccccattgcatttgtgacaacactttcttcaggaggagcggtcaatgccgcgcctttcagtttttataacgtcgtcagctcagatcctccgcttctcagtatttctgttaacaggacggaaggacgccaaaaagatacagcgcgaaacgcagtggagaacggagaatttgtcgttcatgtcagtgatgaagccatcattgaagatatcaatgaaacagctgcaagcttaaggccggatgaaagcgagcttacacgcacctcgcttcatcctgttgaaagcaaagctgtttcagttcccggcattaaggaagcccgcgttcgctttgagtgcaaattagagcggcatattacctttgacaatgatcaaggcatcactacagcagatctgctcatcggaagagttgtctgcttccacctagatgaaaaggtgtatgatgcagaaaagggatatattttaacggatgaattaaagcctgcctcacgattggcgggaaatcactatgccaagctgggggaagaattcacactgattcgtcccagctgaagagaaggactatttaaatagaagaaactagtcaaaaagaccttatgattacaaaatatcgcctgtaaataactgaaaaaatatcaaaaaaaagaacacccagagcaagctcggggtgttcttttatgaaacgtttttcctttttcttcgtataaaggtagattaggaggaattggaatgacaaacttttggattttaatgctgatcgctattaccatcagtctcgcctctcaattttttataaagaaaaaatacggtattgataaatccggctggcgatataagcatgtcagcaatacacacaaatggatcgaaatcactttacttattttgtttgtgttttcactctccttttttccagttgaatatttgcttcttttattttttattgtgattgactcaatacgaatttttatggagtggcattatagacctgaagataaacagtatatgtaccacattgtagaggtctcacttatgtttatgcttttgatttatatttgtaccctatagttatttaaatccccacagccgctccgtctccccgaggatcggctccgccttggagaaagccttcttcatcaactttgattgcagccgcttgtcccatcagcggatcatagtcaccgacaacctccacgagatgcccgctgtctttcagtttttggattgttttgtctgtgaatctgccctcgactctgagaccttcgtattcctctccccacgttctgccccatacccagcgcggttcgctgattgcttgctgtggatgcattccgtagtccagcattcgggtaatgatggccgtctgagtctgcggctggccttcgccgccttgtgtgccgtacagaatttttggctttccgcttttacagaccatagccggcatcaacgtatggaaggtgcgctttctcggttcaagcgtgttgacatgattttcatccagtgagaaaaatgatccgcggttttgcagtaatatgcctgtatcaccggctgtgactgccgagccaaattcaaagtacaggctttgaatgaatgacactgcgttgccatccgcatcaattacggccgcatatgccgtatcacttcccaccggcctgctttctgccggttctgccagaatgccgatttctcccgccaatcgtttcgcataatttttatccaaaagcctttcaagcggaatgtcagcaaacgcagggtcagtcaaaaaggcattccgatctacaaaactctttttcagcgcctccacaagcacatgataatactcaaatgaaccgtgctcgatttgggtgaaatcatagttttccaaaatgttcagtgttaataaaccggtaaatccctgagaattcggcggcgcctgatacacactgtatcctcgataatcacttgatacaggctctgcccactcaccccgatgcgctttaaaatcatcgattgtcatgtaactgccgttattctgtaaatgtgagacaattcgctgagcgagatctccttcataaaatgcgcttcttcctttttcagtaatcaagttcagactgtctgcaagctctttttgcacaaaccgctctcccgggacaggcgctttgccccttctcgtgaagatgtcagccgtgtaaggcgtggaagccagcagttcaatattcttttctgtgtgacgacactgatcagctgatacaggaaacccattttgggcataatcgcgtgcgggctccaatacatctgcaagagacagacgcccgtactccttcaggaccgcatcccagctatcaaccattcccggcacggtaatggcactgtcaattccccgcagcggaatcgcgctttttcccttatatacatctctcgttacgttttttcctgaacggccgctgccattgtagacttttactgcctttgtttcctggtgaaaggtcagccaaaaggaatccccgccaagtccggtcatatgcgggtacacaaccgcaagacaagcactcaccgcaacagcggcgtcaaacgcgttgccttccttatccagtatgcggtttccggcttgagaagcgaggtaatgcggactgacgaccatttgctttgtaccgatgacagatctgttcatcacaagtccccttttttaagaaattttcttcagtatagggagcctgatttttcacatctactgatccggcagaaaaactgacgaactttcttcttttcgcaaataacaagatattttcgcattcatttcgaaaacaaatgaaaaattattatttcgatacgtaacttttatgataaaatgattgctaaaaggctacgaaagcaggtggagcaattgagtcatgaatatcaaatccccaaccttgtacttgatgagactgataaacaaattctcacgattttgcatgaagaaggcagaatttcttatacggatcttggcaaaagagtcgatttgtcacgggtcgccgtccaggcccgtatcaaccaattaattgaagccggtgttattgaaaaattcaccgctgtcatcaatcccgctaaaatcggcattcatgtttccgtgtttttcaatgtcgaggtagaaccgcaatttttagaagaggtcgctcttaagcttgaggaagagcctgcggtcaccagcctttatcacatgacaggcccgagcaagctgcatatgcatgggatctttgccaacgatcaagaaatggaagaattcttaacaaaacggctgtatccattgcgaggcgtcgtcagtgttgattgccagatgctgatcaaacgatacaaaagccgtatgggaatgaagctgtaaaggagagaaacgaatgaaaaaccatccttatcgggatatgacggccgcaatggttcgcaccggcatattagggttcggcggcggaccttccgtgattccgctgatccgccatgaagcggtcaataaatataaatggattgacgatgatgaattcggagaaatattagcaatcgctaatgcgcttcccggaccgattgccaccaaaatggctgcttatctgggctttaagctaaaaggcacattaggtgcagttgtggcgaccctcgcccacattctgcctacatgtcttgcgatggtgggcttgtttgcggctgtaaatgtgttaagccattcagcaattgttgcaggtatgatcggtgccgtcacgccggtaattgcggtaatgctcggaatcatggcgtacgagtttggccaaaaagcgcttaaaggtttcggctgggttaccggcatcctgttttttatcatcgcttttatcggcctgcaaactttacagattaatcccggcctggtcattatcattttcttagcgtacggggcgtttcattttaaactgaaagacaaaatcacaaataaacattcaaaagataaaggaatgtcagcctcatgatatcgatctatttatttatggcgttttttatcgcaaacctactgggatatggcggcggacctgcgtctatcccgctaatgtttgaagaagttgtaaacagatacagctggctctcaaacgatcaattctcaaacatgctcgcacttgcgaacgctttgccgggcccgatcgccacgaaaatcgctgcgtatgtcggctacagcgcaggcgggtggcccggcttcctaattgccctgatcgcaaccgtcgtaccgtcggcgctcgcattgatcgtcctgctgcgcatcatccagcgcttccgccaatcacctgtcatcaaaggcatgacgctgtccgtccagcctgtcatcgcggtcatgatgctcattcttacctggcaaatcggcgcagacggcatcaaagcgatcggctggatccaatcgatcgtgattgcgggaatttcgctccttgccatgacaaaattcaaaatgcatccggcatttttgattatcgcggcgtttttatatgggggccttgtgatccctcatttatagaaaaaagcacctggacaggtgcttttttattttggcccagaaatgccgtttgatatgacagctgtttcttctcctgcgtcactcttgatgatgtgcttgacttgcagcgtggttcctgccattctcacagattgcttcaactcggacgaattggtttcaacttgtatccaaacaggaggctggaccttccaaaataaatagagtgcaagaatcagcaagccagcaatgaccgacagcaaaaacttcatatcgcatcgcttcttttcagtaagcggcccgcagcggacagcgcctgatgatcacgaagaatatcgcctggacgattgccttctcccagcacatagcctttaaaggacattcccataaaatgaaaaatatgttcgaattgctgaatcagcggcagcccttttatttttggattgtctccgcccactgctattacatatgcctgtttcactgacatttgctgtttaaaatcaggaaatctcggatctctcaacgtctgtgaccagcgatcaataaacagctttaatgtccctgacatgccaaaccaataaattggggtggcgaatacaagaatatggcactgcaatatccgttcaatgatagaatcgtagtcatcttgaacaggacgaaagccgccttgggcgtgacgcagatcttcaattggctgaattcgatatttctgcaaataaatgtgctccgcatcgaatccttgaacagccttctccgcaagaacatccgtatttccgccagaccgagttccgccgttaataaccgcaattttcatgatgcatctgctcctttgtttacgaatgattttcttcatcttataatggattcatctatcaatacagatgattatttcgattaatccaatcgctaaaaccgatttagaaaggaagagaacaagtggaattgaagcagctgatcacctttattacggcggcagaacatgtaaacttcaccctaaccgccaaaatgcttaattatgcacaatcaagcgttacctctcagatcaaatcacttgaagaagaaattgggacgcctttatttgaacggctcggcaagcggcttatcttgacagaagcaggaaaaacgttcaaatcttatgcacagaagatcattgcgttaacagaagaagcgaaaatggccgcaaatcaagtaagagaaacaaccggaaccttaaaaatcggggcgacagaaagccagtgcacataccgcctgccccctatcataaaagaatttaaacaggcttttccccaagtaaagctcatattcaaaccatatatctccaatgaacaagcgaaagaacagctcttacagggccagcttgatatcaccttcatcttggatgtaaaccggatggaagacgcactgcacgttgaatctttgattcaggatgagatcaaaatggtggctgctaatgaccatccttttcctgcggatttaccagtaacattgaaggatcttcaaaacgaaactcttctgctgacagaggacggctgctcgtaccgcacgctctttgagaacaatttgcatgactccggtgtctatcctaacaaattggaattcgtcagcatagaagccatcaaacaatgcgtgatggccggacttgggattggaatcttgcctgaaatgacagtaaaagatgatattgcagcaggccggatgaaagaactcaattggcagagcgattgccccgttttcactcaattagcatggcataaggacaaatggatgtctgcgccattaaaggcttttatcgatttgacacggaaaacattcaaataaaacctctccacaaggacgacaaggtttttgagaccaggaaagcacacacatacaaaaaaacacttgatgacttagagccccaagtgttacatgtgatttttctgataaaacgttcgcaaaacatgcgtttcaaggtcagccaggcggacagggattggcaatctgctttcttgattgatcaagctcatcgtgatctgatagctgctgtctaaatcaatataattaccgcaagacaagaaaataggcttcacgtccccccgcgttcgcagcgcccggccatatacctcgccgtcaatgagaatatcggtgtatgcaccgacttcattttcaggcatcacgaaatcatagcctttgattttgagataggttttcgcaatcccaatcgtcggcttgcccagaaaaaaagccgcatgggtggcaacgcccatatgattgtaatgcagatatccgttgccatcaaacaagaagacatccggctccgtctccagctttttcgccgcctcgatgatcaaaggcagctcgcgaaacgcaagaaaaccggaaacatacggcacgctgattctccccatgctgtgcactttttcaatgacttcttttgtatcagcgtcaatcacgataatactgcacactccgtatggttctccgttctgctcccaataggcgagatcgacgcctgcgcaggtgttgatggagttgggatggatcgtgtgggataggttgatacgatttctaagggattgttgtgtttgaacaaaatccgattcatcttttagatgaaaatcgtgtatttgatgtatttccattttacttgtttccctctcttcgcgctcaattgtcctgcatgtcgattctagcaatgacaccaaattatatcattgaaaaaagcagatagtataatctgcttttttattactattcatttttcatttctttcataaaaatataatccaattgtttaattaattctttaagttcagtacacataatatcctctaaaggattttcccaatcttcgttttttatcagttcaatcccatagcttccggctggatcaccttctgggtaccaccctacgtcaagcagcaaattttttgtcttatgagaaatctgcaggagatcttgattaaagtcaaataaccaagcatcgtcatttgcctctagcgtcttaggatcagtatcctttaatgtaatataatcaacagtccaaccagccggtatctttagccttaaaaaattgggaatctgttggcttagtggctgtaaaccctctaaaaccccgcttcccacactccagatttgatattctaactcttctaataattgttctatctcattaaaagactcatcttcataaatcttatctgtttttaagccagctactttgatatggtattgattattttcataacttaccttaataaaggccttacgtttttcattttgtagtattagtaattcacatttttcttgcattcttttttctgaacataaattgttcagtactacagaccagccattacagatttttaatggctgcagttgagaaatatggtctctttccatcccgcttctccttgcactccatattgttatactatctataaaaaagcatgccgatgacaacacggcatgtttttaactatagcaattctaatacatcagagtaaacaaggcatctcctaatgttaatctcctgttgaaaggctgtatatgcggcaattcactccactcatacacagtatcgtagtaatcatacaaataactgagttcaataaaccctttctcttgcattattttattaatatagttcgttccctgaatgaattctaaagattcagcggtgcctacaatatcataaacgccatcgattaaatcgtgtcttagggaataactataatctaatacataaacaggaaccaatttagatactttcatattgatttgctgttctaaatgaaaaccattttccccagaaagatcttgcaaatggatatcaatttctcctgaaggattgtttaaatctctaacttcaatttttttcaaaccttttatttgattaaattcatcaggtacttttattttctctgcgcatttgttcttgtaccattcgcctaattccctattcacaaatagacgataaagcaactcaccaatttcaggatattcattaataaacctgattccatgttccataaatagtaaccattccatcctttaatcaagaaaatctaaacttcattccaccaagtagttgttacttgttttaaatgatattcaatatataaaatcacttttttatagtcatctgatgaaaattctttaataggatcttcccaatcattatctttgactagtaaaaccagataattaccttcaggagaaatgtcaggaacccagcctaaatcaagcgttattgaggattgttcatgataaagctgcaacaaactgtctgtgaacaaaaaccaggaatcatcattcggttctaatgttcttggatctatttcaacaaaatgattataatttactttccaaccttgtgttattcttaagggatgtatattagcttttggaacatctaatttaacatgttttctcatttatataacctctttagagagccgttattcttaaagtctgtttttagataacttgtcaaccaactatttgagtgggagacctgaaaggtgaaaatgtagattatgaataatatttacttagctgtacgaacttcattttacaaggctgccccttgcatctatattcatcttactaattatcttatagatcagtttcaatgcaaaaattttaagtttaaaaaacctcgagaggcaagcgccaatcgagggaaggttagtttttttctacttacttgttaaaggattaaaactgatattcttccagaaaaacgttatgagaacattagctgcatctcatattatctttcctctctgcacaagtgattatattcaccaaatttagggaaatcatcccagttgctcttaaggttgtcgctagtctcacgctcttcgaccgaaccggtcttgaaatctgtcttctccattgctatatgaccatcttcgcgaaagcctaaaatcaaactgctaacttcattatcagttgcatcatcatattcccaatacattgctgttcttaagaagattttaccatcacttataacttcaaaatcataattcagatacttacgagtcaagtcatcataaaaacccactgaaacccatttatttgttacatttacaacatatttaggtttttcgccttcggttaataccgcagtatatggttcatgtttttggtgatgtaagtatgcggtacaatcatcaagaatattccaaggctgtttttttatgtccgaccattcatcacaataataaactttcatagtcaattatacaccttcccatttatatccctaataataatcctattttttgttgcttcatcaagaattttttgtggaatagctttattttgaacaggtacttctaatatcaattcacctttcagtcatccgcctttaagagcttttggattaaaaggaccatttgatattttagaccctgaagaatattttttagtaatctcgttcaagtaactcagtgctgtcttttcttgaacgtcactaagttgagtatacttcctggaaactatctccttatttggagaatatgaatcaactacgtactttttgccgcctgcttcttttgcttctagctctacttcattataagggtaacgggggcgattttccttattgaaattatttcctgcttcccaccgttctttaagccaagacggtaatggattcttattagatgacttccccgtacccttaatacctttaccactactaaccatcttcacaatcccaagatccttaacagccgtcttttccacatcgacacgtactgtcgggattccgaatgtaaagccatccggagttacagggcgttctgcgtacacgtggacgtttgttgggactttgaattgttttactttctctagtgttttgtttgctttttggacttttgaatgggttgcaagcgggatgcctttatcaatatgtttcgccagtgcaccggctccaaccaaactcagcacagcttccagcgccccctgcttccgcttctcctcagacactttgtttccaaacatatcccgtcccgtgacggcttctgagaatccgtttgacgcaacaaggccgtatgcacccatttctgtcattttgagaatgtctaaggatttgcctgttttgtaggcgtctaaagcgtgttcagccgcgatagcagcttttccggttttgtagatggcttttccgcctttgaaggcgcggcctgcccagccgacgactggtataaatcccacggctgccatggtgccgactgtgacgcgttcaaagcctatacttatttacgctatataaaacagtggacaacaaactaataaaaaaaccttgaaaggcttcagtgccaatcaaggtagaaaatcaaaccaactcgaagcgtttatttgtttttaataatgccttaagattttttaacaatactattaattccttcaaatataatatctctcataacttcattattactgttataatttctttcatttcttattttattaaaaacctgctttataaccccatcaatcattattgttaatccttctatatcttcttcactaccctcctttttaaaactttcatttattattaccaagctatcatcttttgacattttattttctcctttactctctttctttctcattaaaaactttgtctatataatttacttcatcaaaaatccagtatctatcctcttcaggaatataactagtaaagtcttcccgaacccctgtccaattattaggaacataattttcaaaaggtaataactcaggatacagcgaaagaagcattttttgattaaagtctatatataatgatggccttaattctagaatagtactttcataatcctgatgttcaactaacttctttaattctgaagacgggataatatagtcagtatattcttttaaataaagacgataattatcttcatttacaactgaaatgttatttcttagagaaagagcaaagtccatatcaaaactaaacccgtttttttcataggcttctttatatttcatgatatctagtatccaaacatctctttctgttagataccatgagaattgagaagaagtctttaccccgactattatattttgggcatactccggttttaataacaacgaaaacaccactttctcattctatttttttggctgaatgcccatattcctctaaccactctatccatggttccgccggaagttcataactaactcccggtgtcgtaggatcaacaagctttggagcagttctcccctggttacgagggtttttagtatatccatactgatcaattactgtctccttgattaaatcatcaatctctttaggtaccttaaattctacaatttctccgcctggtcttgctacatctcgataatatttagcgtgttctaaattgtaagcacttatgtttaaatcagcatttttaataggaatagcaatgcttccatcactatttactttaattctatactgacttgttttatttcccgctcctcctccttgaactctgtaataacttactgattgttcgacaggatcgacagattttttacttgattgtaacttatcattatttactttcttcgtatataattgtttcttctctggctttaagtcaaatgtatggccagtcgaagtaacaatctgttctttatttatatgaccactttgcttaattttagaaaaagaataactcttatcaagatttcttcccatcgatagcgtattgtcaaccgacttcgccaatgcaccagcaccaaccaaactcaatgccgcttccagcgcacccgttttccgcttctcttcagacactttgtttccaaacatatcccgtcccgtgacggcttctgagaatccgtttgacgcaacaaggccgtatgcgcccatttctgtcattttgagaatgtctaaggatttgcctgttttgtaggcatctaaagcgtgttcagccgcgatagcagcttttccggttttgtagatggcttttccgcctttgaaggcgcggcctgcccagccgacgactggtataaatccggctgcggccatagctcctgctgtcacacgttctgcggtggagagtttttctccggtaaccggatcaacgccttcagttgctcttttataatcataatagccagtgacttctccagtaaagttgcaaactccatcccatgttttttcgtaccatggtttgtttgcttcttcctcggctttttcctggagacgtcttgcttctgcttgctgggcttttgcatcaatataggttgttccttgattttctacttcaatgacgcttttgtagacttcattgctgtggaaggcttttttgtcatagtacataggggatgcgctcttcccattgctggtggcctgcatgagaacagaatatttggtgagcactgcgttgtccagagattctaaattttgatattcagtggtcagggattcatcaagcttatcgacagctgtgatcgtgtcacgtctgactttttgggcatcgcccatcttatctgcatactcgtcaagcgtgtacatgtcgaggtcaataatatcgctgatgcctgacaaaatagaatcgatttcttctttatgagcggagactatctctgaggctttcaggtctccattgggcagctcatgatccaaaaatgaagtttccacatatgaatcattcagttcttgatctttaatatcgcctgaaatgccgtttaaaaatgcaatttgagcagagacaagcgtcagccagctgtcgacgatttccgcctgtccctgaaagaaatctttaatattgtccgcgccttttcctttaaaattatcgcctaaatctgcaactccctgaaacgcttttttcagcgtattcagctgctcttcaagcgtctcatattgcttttttctgctcttcgcttcttcgattaaagattttgattcaaatactttactcatcgcactgccctttctgttctattttaccgctatcgcctcgtcctgctctttaagtgaatctacgttatcctttgtatcctcgatatttttctgtaccgcttttttgtaatctccgagcatggttttgatgttctcctcacgctcatgatattttttcgtataatcgagtttattttttccattggaccccgcggcgccgattgatacgtcagcaagcgcatctttgacagactctaatgttttgattacagcatcgtatttcaatttaatttctgacataaaaaagatcaccacaatttaatagatttaatttgattaacagcatcctccaagaattcttcacccttagcaagagtatgaccagcaaaattcgctagctttaattctttgtcatagagaaatttcatagattccaactgaataatctccatctgaatcgaagccatatactcgttatatttatcattcacaatcttagatgcttccgatttcgcctcttctcttcccttgtcgaaatcatcggcttttgttcccgtccaatgcttgcccaattctggttttacaatttctttgatttcagtgattgcctcttcttgcagtgtgtctatgtccttttttgcttttttcagcttttcgatcttgtcttccacgtcggaaatttttccgttgagcgaacttttgatatccgccagcatactttcataacccatctgaatcacctcttaatactcaaaaagtcgtatggaggggctgatgaagatagacttttccatactttatttccatatattatattttaaaatagccagaaggcggcttaaatagggtaaatggcttaatttaggcatataacgctcttgaaatgtaggtatttgatcttgtttttgttcgttatacagctaatgaaaacgttttttaaaatgaaatcacctaaagtcatagttataaaggcacttgaaagaggcagatgttgttgatctgcctcttacggcgctgagcttattgttcatgtttatgttcttcatcaggtcggccacgtctgattttgtctttggcttctattattccccgcttctgaccctttggatcaaaagcttgtattagctgcagtcccagttgtacagaacgtttgaaaagtcttttttccttagatcgtcaggtgtgatgaaaaaattggcgatgccgacgtctccccacattgaatcgatatcatcgtctgaatcaatttgtaaaagcatgatggtgtgttctttatatgcgtattcccgtggatcatgctgggtaaaagaagcgtatccgccgattttatggccaaatccgttttcagccagttcattataaatgtcttcttcatcctcgccgaactgaccaaagaactccattgtttccatgcccgtatactgctcaaattgaaaatctgtaggcagcacccattccgaagatttcacaggctcgactgccgcttctgataaaatcggaaaatcacattcgcctgtgccaataaatgaaaaatcagaaacaaggtcgtcttcgttttctatgatattttcaaaatagatcactctgaaattcttttgttcacatcgatcgtcaaaattcaatccatagacgtcatcatgaagagaaatgtagaactgcaggatacctgaagaaggatagccgtcaagctggggaatgtgcgagaaattaatctgcgccagaagcttcatcggctgtccatattcgtcagtcggatatgtttcatgcttggggaaatagggatcaccggcaattttgctgtcatatcgtcctgttttcccttttctcacattcagtttcacgtattctttcgctgatttctccagcaagtcgcggtacggtctcattttttcgggtagatgattcatcagattctctccttttccggcatctccaaggttttattttctggttttcttcgtttcttctaatgtttttcaaacgattgtttaaagaagccctacttctgtataattttccaaacaatagttaaatagtagcaaatgtattcagcaccccgcaatagatgaaaaaaagactggtgcgcaaccagcctttctttttcaactattgaattgcacctgacggaacaaccgccttccgtccgacagaataatactccactcctgcagccaaagcctcatccaatgtgtagcagtttctgccgtcaaatatgagcggcgtttccatcaaatcctgataagccgctaacgggaattgtttaatgtcagcccagtcggttaaaatcatgacggcgtcagaccctttgacagcttcctcgatcgtctctttatattcaacagcttgcgggagaacatgctttgcatggctaactgcaatgggatcgtaggctctgatacgggcgtcgagcgcagcgagacggtctgcaataacaattgacggcgcttctctcatatcgtcggtattcggtttaaatgacaggcctaaaagggcaatcgtttttcccgtcaccccgccgagcctgttcagcgctttatcaaccagcatcgcctgctgattgttgttgactttgataaccgatttcagcagttcaaaatcatgctcgacattgccggcaatttgcacgagggcgtttgtgtcctttggaaaacaagagccgccgtagcctatgcccgcttttaaaaactggctcccgatccgcttatcctgtcccatcccgtatgcgactgcttcaatatcggcgccgaccttttcacatatattcgaaatttcgtttataaaactgatcttagtggccagaaaagcatttgaggcatatttgatcatctcggcgcttctgatatccgtttggtatatcgggatttgaaacggacggaagagctcctccagcgtatttgctgttttctcatcggccgtcccgatcacgatcctgtcaccatgaaaggtatcatagatcgccgacccctcacgcaaaaattccggattggatgcaaccgaaatactgacaggctccgctagatgttcagtgatcagtccattaatcaaatcgtttgtcccaacgggcactgtgcttttcgttaccacgactgtatctcgtttgacatgctttgcgatgcgtttggccgcatctgtaatttgctccagattggcgtgcccgtcgcttttctgcggtgtgccgaccgctataaaaatgatgtctgcctgtgccaagcctttctcatagctcgtttcaaagttcagccgtccatcagctgtattttttctcatcagctcttcaagacctggttcaaatatgggggaaatgccctttctcatttcatcaatcttgtgagcgtcaatatcaatgcaggttacatgatgtccaatctcagaaagagaaacacctgtcacaagaccgacatagcctgttccgatgactgttatattcattgtttccctccaacagttaaattgctgctttgcagcttccgtaatatcgtatgagaacatcctatcatgaatgcgaatgatctcccgcatagcctgtcgggtacagcctgtacagatttctgaaatgtgattcaatcatacaatacactattatatcgctctcaaaaagaaagtggtgaaatgagaatcggctgttaaaaaagaccaaacaattttcttcttttgaccggttgcggaggctgtctgaagatggtctgattccgcaggagaagctctgcattttccgtcagcatataaggaagttccgagccgaattctttctctagaacataaagggcctcttgagtgtgaaaatttctcgttttcacattatgggcatctgaggctacgaaatggatcaaattggcttcaaccagccggagagaaaatgctttcagctgcttgccgaaggtccccgcaagacttcctgaagtaatctgagatgctgctcctttttccacaagatgatacagcaaggacgggttttcgcgaatttccctgttgcgttcaggatgggcgataaccggaatatatcctttcagctgcaaatcataaaaaagctgctccgcatatcggggaacgtgatcaaacggaaactcaatcaagatgtgttttgtatcattcagcgaaagcagctgctgtttggcaaggtcttgttccacctcgccgtagattctgatttcctgtcccggaagcacatgtaaaggaatgtcttctttgattaaacgtttgtttaactgatctgctgcttctctgactgcagctggctcgtttttatacacaccgttgttatgatgaggtgtcgcaatgatcgtccggattccctgacgaacagcggctcttgccatttctatgctgtcggccgaatcacctgccccgtcatccattgcgggaagaatgtgacagtgaatatcgatcatgtcctagcccccttttttcgcaaaaataaataacgggcacgatgcacgttatttattttgcatgaaattgtccttgtttccgtaatatccgtattcagagtgcttcgaaagctttttgccgttcataatcgccccaagaagcttgcttttgcacgtttcaagcgcctctttcgcttttgcggcttgttctttttctgttttcccgcttgaaataaccagaacagaaccgtctgccacgttgcctaaaatctgtgcatctgctacggcaagaataggcggcgtatcaaaaatgaccatatcatatgccgcacacgcttcgtatgcaagctccttcatccacttcgaggagagaagctcggccgggtttggcgggatcgggccgctcgtcagcacgtcaagatgtttttcattcgatgcctgtacagcctgctccatagagcttttctttaataaaacagatgttaagccaaccgtattttcaagaaaaaaggccgtatgtactgttggttttcgcaaatcagcatcaatcaggagcactttttttccctgctgggcgaatacgacagccaggttggcggccgttgttgattttccttctccgggacaagccgatgtgatcatcactgatttcatctggcggtccactgaagcaaattctatattcgtgcgaatcgtccgatattgttcagagttcaaggatttcggctctgtcattgcaatgacatttctccgcatccgcgagtctctgctttttctaagcgccaaaatgtccactccccgttttttcagattggaaaccctgtaaggtctttgctgttttctgctcattcgcaatggtggaaactgtccctaaaacaggtatgtccagcaaggattcgagctgctcttccgatttgatcgtattatccaaatgctcgagcaggaaggccagtccgatgcttcccgccaatccggctgcaaacgcgatggcaatgtttagtagcggctttggcgatacaggggacggatgttctgaaacctcggcttttgacagaatgctgacattgtcaacattcataatggatgtgattttgtcttgaaaaacagatgctatagtattggcaatatgagccgctgtttccgcgttttcatccctgactgatatgttgaccacttgggagtcctgttcgctggatacggtaattttgtcattcagttcttgggatgtcatcgacaggcccatttctttaatgacttcatctaagatggcaggacttttaatgatgacattgtacgtattgattaactgaagattggtttggacatcgttaaattgaacttcttttcgttcatttttcgattggttgaccagaatctgagttgaattttcatagatgggtgtaagtgcgaagaaactaatgagtccgccggcagcagtggcagctgcggttacaatcataatcaaaagtatgcgttttgttaacgttgataatatctcttttaagcttgtagattctcccatgatacctccaaatctcttataacatccttttccatctacgattatacaacgttgaaaccgcatttctccagcttttcacgtgacataattcgacatttttttacaaaacgaaatgttactcttttttatgtaagcgctatatttactgtgttgacagcgctgtctcattttctcttattcgtgcagtcacgtaacctcgcataaaaaaatcccgcaaaaggcgtgcgggatttttatgttgcatatccatttttaatatgagaaatcaaattttcaagcatttccttcgtcgtcatctcagatgactgctcaccaatttcatgtgcatgcatcaaaattttcagaaattcttcttgattcaatttcttttcactcatcttttttttcctttcagcttccattaagttgaaaacacgattattatatgatgctggttatcaatttgcaatctctaatacatcattcgacacatcccattttttatgtccttttttaggaaaaactttttaaggccgatgtgttgcgatataatagagaaattggatctttttattacgtgactcggttaggagcgataatcatgcttcagaatatgatttccaaagacgatgtgctggcatctgctgaacagttaaaagaacttcttccttacaatgaggaaaatgttcagctgatcaaaaaagcccttattttatatcggcaggattcagtctatcgtttacaagcagtgagtccgacggaagttacggcttacgtgcaggatgttgtgcctgtgcgggtcacattgaacttgtttgtcatagtcaaaagcggctgttcatgtccgtccggaagaatctgccgccatatgctggctgtgtttttatatgtatatgcaatgttcgagcgagtgggtacttttacagagcattggctggagagggaaaagcttgaggaaagcaaagagctcgtccgccgccagtttcaggaaaaggtgctgcctaatgaagaatcgctttcaagctggcttgctttttttgattcagagttttctctctggcaggcacgtacgccagaaggcagccaaaacatgcagggcctctattacggctacctgtccgcattaaaaaaacatgcgccgaacaagccggagctgaaaagcctgtatcagattcattccgcgattgcggtttggcttcgcatgttcacattgattgaagcgggcaagctgaaccccgaacaagatttttattccctcaatccgtacgttgaacagctgatggatacaatctacagctctattgacaaattaaaaacgtacgcgctgtcttttgcgcttgatccgtttttggataaaacaccggatgttatccgacctttgctgttgaaagaagaaattttccaatatgaacgcatccgcgtcttcggtgaaatttggagtgcgctgttgtcgcggccaaaatgggtggcacgcgaacaggagatattgaaaaaagaagctggacggcgtttttctcccgaattgcaattcgggcgcctgcatttggaattcctgcaaaagaatgatgacgttatttttgcggaagcggatcaattcccgccggaagcgctcccttatacgttccaatggctgagtgaaatgactgccaagaaggactggaaacggcttaaaacatggtaccagcaaattgagccaattgcgatgggttatacgaagctggataagccgtttaaagagattcgcgatgtgatcggcgagctgttccttctgttgaatgcctatgtgcagcaaaccaatgatcaagcgctgtttgagcgctttgccgcgggctgtctgccgtatacgttcacagaatacagccatcatttatatgaaaaaaaacgctatgccgagtggattgaaattcatagccttgtcggcttttccatcaatgaaatggataaaatgatgctcaaggaaattgcagcgagcgaccctgaggcgcttataccggcttaccatagagaagtggcttttttcattgatcagaagaaccgcagctcgtacaaggaagccgcccggtatttgaaaaaattgcgcaccctgtacaaaaaagcgaaaaagcagaaggtgtgggagcggtatattcagctgctgagctcgcattacaagcgcctgcgtgcgcttcaagaagaactgcagaaaggaaagttgattgatggcgagtcttaaagaaattctcatccacgtcgaacaaatggaagatgggtcatttacgctctcagcctttgatgaaaatgagcagcctcttccctacagccatatgaaaaagcatttgttccaatggcatgaatcctcattttacggaacctttctagaggatgtcagcttcatcgggacgactgctgtcctgctatcgccatggatgactgtagagcttctcggcaaaaactcgttcaactcattcagctccgtgcagcttacagaagaaacggagccgctgatcgaggcggcatcgaccatctatgaatttatcgcggacggcgattttctgcctgactatgacgcatggacaaacggtgtttttcgctggaaagaccgcgataatatactggaaggctttactgcggaatggttttccgctgccgtacaggattacatccagtacgacgatgacctgcgggagaaatgggaacatatcaaggaaaaatcgcctgcggttacgacattccgcggccattttcttgatgaagaggattttctggaaggcattggctggattgacgatcaatctccatttactgtcggcttgcgcttaaatgaaccggactttgacggagacgaatggaagatcgagatgtttttacgcgataaaaagagcggcgctgtagaattctttgacggactgaagagcctcaaaaaatcgtggcaggcgtacagcgataaaatcgcgcgtgagcaggaccgctttcacagaacggttccgtggctgtcgtttgattccgggacaacgctgatctcggaggaagaagcctggatcttcctgtcagaagcaagtgagacgcttgtcgatatgggggtagaaatcctcctgccgtcctggtggcagattgtcagagacagcaacatgatgctgaaagcaaaggtgtcgtcctccccgcgcggcgagtcatttgtcggcatgaatgcactgcttgatttcaactggcggttcgcgacaaatggaattgaactgactgaggctgaatttaatgagcttgtcgccagcaacaggcgccttgttaatatccgcgggcaatgggttaaaatcgatccgcagtttatcaaacagatgaaacgcctgatggaaaaagcagaatcagagggactccacatgtctgatattctggcgcgcgagctaatggatcagcaggatggcggacttgaggattcggacctgattgatacatctgcttttgccggcattcagtttgatctgtctaaacagctcaggtcactgattcgaaagctcactgccgcggaaaacctgccggagcacgaagtcagtccttctttcaaaggaacgctccgcccttatcagaaatacggcatgaactggctgctgtttctgcgggaaagcggttttggcgcctgtctagctgacgatatggggcttgggaaaacgattcaaatgatcgcctatttccttcacgtgaaggaaagcggccggcaaaaaacgcctcatttgattattgcgccgacatccgtacttggcaactggcagcgggagcttcaaacctttgcccctgatctgtctgtcgcgctccattatgggccgcgccggccaaagggtgatgatttcgccgcgcattatgaaaacgcagacgtggtgctcacttcatacggtctgtcacatgccgatactgaagagctttcttctgtgacatggaacacgatctgccttgatgaagcgcaaaatattaaaaacgcgcatacgaagcaatcacgcgcaatcaggaagctgaagggtcttcatcatatcgcgctgagcggcacgccgatggaaaaccgcctgactgagctgtggtccatttttgacttcatgaataaaggctacctcggcagtttgaccggcttccataaacgctatgtgctgccgatcgaaaaagaccgggacgaaaagagaatcggacagcttcagcaattaatccggccattccttctccgccggacgaaacgggatgaagaggtcgcgcttaatcttcctgagaagctggaagaaaaagaatttatcccgctgtcagccgagcaggcatccctttatgagcagctcgtcaaagacacttttgaccatatgacgtccctgaccggcatgcagcgaaaagcgctgatcctcagcatgcttggacggctcaagcaaatatgcgatcatcccgcgctttacttaaaggaagagcaaaccgagctgctggccggcagatcagtcaagctcgaaaaattgctggaactgatgacagcgatccgcgcccaaaacgaaagctgcctgattttcacgcaatacattcagatggggaacatgatgaagcggctgcttgaaaaaacgttcggggaacctgtgcaatttttaaatgggagtctctccaagcaagagcgggatacactcgttgagaaatttcaaaggaaagaatatccgacactgattctctcactcaaagctggaggcaccggacttaatttgaccgccgccaatcacgtcatccattatgacagatggtggaacccggcggttgaaaatcaagcgactgaccgtgcataccgcataggccaggagcgctttgtccacgttcataaaatgattacgacgggaacaatcgaagaaaaaattgatgtcatgcttgaatccaagcaaaccctgaacgatcaaattatccaaagtgaaaactggattaccgagctttccacacaggagcttgaagaactgtttacattaagcgctacagcgcaatgatcatgactaaaaaagctggctctgatagagccagcttttttccgttcatagccgtcacgccgaatctccaaaaaatccgttacgccggttatatcaacaggatgcgcttttggagcagcacatatacctacagcaaatgtttcatcatatgtgcgacaccatgttcgtcattggttaaggtgacagcatcggctatcgatttgatgtcttcccgggcattgcccatcgctacaccttttcccgcagcctccagcatcgatttgtcatttaaactgtcacctacagcagcggtttcctcgagcggaatattcagctgttttgcaagcctcttcagcgcctgccccttggaagctttgcgggaagaaagctcaaagttgtgctcagccgaactgacaagcgtcaaatcttcggcatgctcatatcttttccagcctgcctcaagcttttctttgaagaaagaaaagccgagaatattgtaaaaatcgattggctgatcggcttcaaacagctcttgaaaagagttaatgtaagcaaagcccgattggctgtattgcacctcggccgcctgcttaaggacagaaagatccgcttccgggtttgcgcttctgaatctgtccagctcaacatcaagaagttctctgccgttttgcggtgtataaatcgctgaacctgtgaatacctcataataatagttttccgactcaagccatgagagaatatcatacgcccgtttcttatcaatcgtttcgtgatgataaagcctgccgtcgggatcgtgaatgacggcgccgtttgcactgatgacccatgttttgatccccagcggttcaaagattgacatgacgtcaaaatgagcgcgcccagttgacaccaccacttcaatgccatcccgctgcgcctgccgcagtgcgttttcattttccaagcttacctgatgcttgctgttgagtaaggttccatctaaatcaatcgcaattaatttcacgtttgtcagtcctttccttcatcctgctctgtcacgagaagctcaacgccgtttcggtcaagcaagtcacaaaatgcctgattcggcagcctgtctgtaatcaaaaggtcgatttcattcagctccgcatactgataaaaactggtgctgcccagcttcgaatgatctgcaagcgcgatgacctgctttgcctgctgtatcattttccgcttcaccatgccatcctcttcatgcgcaattgtaatgccatgttcggaaataccgaccacaccaatcagcgctttatcaacatggtagcttgagagcttttcaatcacagaggacccgtacagaaagcggtgctccttttccagcttgcctcccagcagataaatttcaattccctctttatcggacagcacatccgcaagattaatcgaattggtgattaccgtacaatcaaccgcattcaaatgctttgcacatgcttgaacagttgtagaggcgtctaaaatcacccggtcaccatcatgaataagcgatgctgcaagcctgccgatcttatttttttcctcagacactgttttcaggcggccggaatagctttgaattttctgatgcacagtcggcaaaatggcgccgcctcttgtgcggatgatggcattctgttcctcaagtttcacaagatctcgtcgcgctgtatcccttgacacttgcaggagcgtacagatctgttccgttgtaattcggttatgctgttttaaaaaatccaaaatcgctactaatctttcttcttggtacacgccctcattccttttctcagcaatcatttataagtaattataagtttttatttaattctattcaacattaataagtgattttaagtaaaaatacgtcgagagaaccaatttttcctaagtggacaaaaagaaagaaccagtctggtcgactggtcaattttgaggggatgatgcgaagattcggataatggtgaatggatagataacgggaggagcaaggggtgtcaatcagcagctttttcccggggtttagggtccataaaacgaacagtgtcagccaacacttctgttacatacacgttaacgccttccgcgttttcatagcttcttgtctgaatccgtccgcttactccgacgagagaacctttttggcaatacaacgccgtgttttcagctgtttttctccaaagtgtgcaattgacgtaatcagcttcgatttcacctgaagcattcttgaaactgcggttcaccgcgagcgtaacatgtgcaactgccgcaccggcggaagtgtagcgaagatcaggatcttttgtaagacgtccgacaagcatgacctgattgaacatgcgattcctcctctccttgcggttgtatgtattgtaaatgatgcaacaagaaaagaaaaacgcttaaaaatggctttcagcctctgtttttatctttcgttttcatttttccttcagctaaaaacatcttttgctttttccctttgaagaaatatgtactttttaaaaaacggaaaaagatttgctttgtcagccagttttgcgtattcatgcgcacataggaagagccatcccacgcaaaccactgaaagctcaattttttttccggcattgacagcttgattttatactgctccatgccatcttgtgtttcgtataaaaaacttattcttccttttttgttcagatgaacctcaaacacttctttacggcttaacatatatgttacttccttttgaatcaaatggctttcagaaggagcgccgtcaatataaatttcttttaaacgaaattgattcataccacatctctccgtaatccatagtcagttacagtataatgaaaaaatagaaattattaaatgtttcgctcatacaaaattctttagccccagcattgcaggattttttcctcgaaaacgtttatgttataatggaaggcaagaaaactttggaagtaatcggggtgagaagaaatgaaaacctttaaactggttgacctgaatgtggaacgagtggacaaggaagaacaatcaatcgaacagtttccccttattgacggactgattataaataaagaagacggtgaaaatcactggctgattgaggcgcttgtacagaaagaacatctgtctttttttgaacagcttcaaaacagccaatctgaagccaaagtatttgtaacgatcacgaaaaaaagcaatcgccccgcccagctgacagcagcagtgaaaaatatcgtcaagctggaagaaagcatccaggttttactctatggacaaatggtaacaagaaaacagcagggcactgaaaccattctcgagtcccttgtaaaagagggctatacaggaacaaaactcattgaggcatttaaacaaaagttataaatatgagggggcatgttccccaaaacagacacagaaccgaagagcatcacaatagacatttagaatagatatgttctgcatgaaaaaagctgccgttttgaacggcagcttttctcttcgtgctttcactcttgcatatttaatttgtatggccaaaagaatcaaccaattcccctttcacaacaaggcgcccttcagttttgacagccttgtcacatgtgattagcgtaatctcttttttgtttgtctcctcaactacatctgcatccgtttccgatatgatgtctttagatgttacagaatagatataatcctttttaaaatccgtgatgacaatttgggcacctgtttttatattctccagaggtccgaacagaagattcttttgcttcaaatgatggcccgccaacggataatttccctcacccattttttgatccgggcgcattgttgccgcccctatcaaaagattttcattggttgtgccttttacgatcggaagctccagatcgacacttttaattgttatctgccgccttgattgtgaagtaaaaataagtatatttcacgtgctttcgacgttctccacttgactggaatgctttaatggcgatcccggcatctgtagcttcaggctttccttcagaggaatcagaaatctcaaactctattttctcagtgttcagcacataaccggctggcgctttcgtttcaacaaaagcgtattgtcccggtgcaaggcctgaagctgtgactttatgatgccggatatgactggtttcgaagtctgtatgaaaattcgcgaacgattcagcatggtggatcttccggttctgatcattacagctgccattatcggccatgacaaatacaaggcttttcatgccggagcgaatgacattttgcaaaaaccttatcattactctgaatttatggcgcgtattcaaaacctgatcatgatgaaacatacagcaaatcaagccacaagaatggaaatggcgtttctccagtcgcaaatcaagcctcattttctttataatgtattaaacacgattatttctctcactcatttggatattgaaaaggcccgggaggtaacagaggaatttaccaactatttaagaatgagttttgactttcaaaatacatcagccatcagttccttcagacatgagctttcgattatcaattcctatctttctatagaaaagacgcgattcggtaatcggcttgaggttcttttcgatatagatgaagacattgactttatccttccgcctttaatgattcagcccttggtggaaaatgccgttcttcacggtgtcagcaagaaaagaggcggaggatggatcaaactgacagctaaaaaacaaagcaaaaatgagtatcacatcaaagtagaggataacggtgcggggatgcctccggaaaaacaaaaagatctcttatctgcggatttcgatcgcagcgtcgggttgaaaaatatcaatcagcggctgaaacatttttgcggaagcgagttgatgatcatcagcactccggatgcaggcacctctgtctcaatgctcattcatctcgctgaaacaacagaaagccccgcgggactgaaggacatagaacgaacctaaacgaaaattgagataaaaaaaagacgccgtttataacggcatcttttttattccggcgactttgcttgctgcttcagcaggtctctgatttctttcagcagctcctcctgcgcatccaccgcttcctccgcagcctcttcttctgctgcttcttttttgcgccttaacccattcaaagtccgaatgacgataaaaatggagaacgatataattaagaagttcacaatcgtctgtataaagctgccatacttcactacagcatcgccaaacgtaaacgacaggcctgaaaagtcaagccctcccagcagcaaaccgaccaaaggcataatgatatcatttactagagatgtgacgatctttccgaaagcgccgcctatcacaacaccaatcgcaaggtctacgatattcccccgcatggcaaaggctttaaattcattccacatacaatcacctgcttttctatatttgtaaagaaaaaaagacaaatgtgccgctggccatctgccttttttcaattattctccgagggcaaaagtcagttctacttcgcaaacgacttcgccatcaactgtggcaacgccttttccgcgcccgattgtgccgcgggcacgaatgatttcaacctcaaggtgaagctggtcaccaggcttgacttgttttttaaagcggcagttatcaatgcctgcaaaaaaagccagtctgccgcggttttcttctttaatcaacatcgcaacagctccgacttgagcgagtgcttctacgattaatacgccgggcataaccgggtactgaggaaaatgtccgttaaagaactcttcattagcggttacatttttatagccttttgcccgtttgccctcttcaacttccgtaatccgatccacaagcaaaaacggataacggtgaggaataatttctttaatttgctgagtatcaagcattgtcttgacatctccttcatctgcattagtatgtatagcaatcatcaaagatccaatctgtacatttgaaaagtatattatgaattaatctctttttcaaccgcgctaaaatgtaaccaactgtcaatgagagccgtcaaaagttatgatatgataattatagattttaccaatagcaaagaggtaggaaaatgatttcgaagtttattgaaaaaagaatgctaaacatgttagacgagtggtattccgcaatgagcaaacgcaaaatgaatcacgtttgcacactgaaagagaaaattgaccagcaccttccaaagatcaaaaagaacacaaaactttggatgcgttatcaattgtttcaggcccgccatcagctgctttttgaaaaccagaacggactcgattcattgttcgatgacctatatggcctggaagacaaaatggatgatgaattgaaatattatctgtattttttctctgggttatatgagatggtaaaaacagctccgaaacatgcagtacatcattttaaaaaagctgaacagtacctggccgccattcaaaatacgtttgaagccgctgatttatattatcaaaccgccggcgcctattacttgatgaaatcaccgccgctttccatccaatacgtcaaaaaagcattacacatctatttgcaccaattcggctatatcaaaaaggtaatcacctgtaaacttttgctcgccgtgaattatattgatcaagaacgctatgaaaaagctgaacagcttttcaaagaaatcattaagaaaacccagcaactacatgacgaaaacctgctatgccacgcttattataaccttggctttttaaaagcgaccgagaaaaaagaccaggaagcgcttctttactttagaaaagtattaaagaatcaagaatttgaaatgaattcaccagtctcatatcttcattgtgtgtacgagtctgtcagagcgctttttaaaacaggaaacatcacagaagctaaagccgtccttcaaaaaggaaaagaattatctgaaaaggtagacattcaaaccatttatttaaaattaaaaacgcttgaagccctctacacctcagtggaagatccctatgagcagctgctcgaatatgtgcttgaattagaaaaaatcgaggcgtgggtggatttagaagtgctgttagaagatattacggaatactacaaaaaaaaggacgatttcgaaaaagccgctttttttatcatgcgcggctgattgaaaaacgcccattttcttattatctgactgaattgattaaaccgagcatttgatctcccattgtgatcgttctgctgttcagctgatatgaacgctgggacgtgatcaaatctgtcatttgttctgaaatatcgacattggacatctcaagtgagccctgctgcatgccgatgttttgtctattagcgccgtttagctcttcaaaagctgccgcattatcaatagagaaaaggttattcccttcggatttcagctcttgagggttattcacttggacaacgccaagattaaaccgctgaaccgcgtttccgtcagatgcggttaaggtgccgttcttattgatggtgatattcttcattgagctgtcgatgttcactgtattgccgttctcatcaagtacgggatacccatttccagtgacgagctgcagctggttggcattcgcagcggacggcgttacatacagcgccccgtccctcgtatactggcggtttccatttacatttacctgaagatactggtatggagacgtaaatgcgatatccagatcgcgatcggtcttctgaatgcttccttgatcagagaccaggcgtgaattcatcatcgctccgacgccaaggcgtaagccgggcggcgttttgcgggcttttgccacttcctcgtttttttcatcaacctgatcgaattgctgtctgacaagctcagaaaaattcgtatcttttgccttatagccggttgtgttgctgtttgaaaggttgctgctgattgtgtcaatctgctgctgcagctggtttaaggttgttgatgccgttagcattgacctgagcatagttgatgtcccccgttttttcttccgttatcttaaatttttccaatttcatttgctgctttatccatacttttatcgtaagcctgaataaccttctgattcgcctcaaacgatctgtacgcttcagtcatttctgtataggcgcttgtcacatccacgtttgaaagctctgagacgccttgttttaatgaataggatacctgattgtttccggctgcgcttggcagatcattaccgtccgccgtgctgtacaaatcatttccgtcccgtttgagagtgcggacatcttccgccattctgacatcaatctggccggctgtgcgtccgttcgttgtcacagtaccgttttcagacacagtaaaattctcattatcaacagtgattggctggcgatccgtcgataaaatagggcgtccgttgatcgtcagctggttgttctcatttagtgaaaatgtgctgctttttgaataacggattccatccgctgtttgaaccggataaaaaagagcagctttttcattggtttccgcattcatcggaacttgattttcgatcaatgcaatgtctgtaggctgatctgtggacttcaggcttccctgtgtgaagagaggcttgagctcctgcatatacactccggtattcacggaaccgatttccgtcctcgatgtcccggccggagattttgattctattctgctgagcagcatttcagggaacgcgcgcatcgagccttgatcagctttatatcctgatgtatttgcgttagcaatattatttgaaagcatttccgttcttcgctgctgggcaatcattgcggatgttgctgtatataatccttttaacaaatttcccacctctaaaaatggcattttttccagttgtcatataggaacgttcgttctataataaaaactcagtattttatcctattatcgtcatttaacatcttttcgtgaaggctttttcataaaaaaacctcattctttttcagaatgaggtttgtgaaatcagcttagtttgcgtttaggaagcttgtccatattatcaagcatgacacctgtgccgatggctacgcaatccataggattttcagcaacgaggaccggtaccttcagctcttcagcaagcagctggtcaaggccgtttaagagcgcgcctccgccggtaataataacgccgcggtcaataatatcagcagaaagttcaggcggtgttctttcgagcacttgttttgcagcctgaacaataacagcgacagattcacgaagggcttcttcaacttctttactgtttactgtaattgttcttggaagaccggaaaccatgtcccgtccgcgaatggaaatttcctcgtgacgtgcgtctgggaaaacagttgcgactttaatcttaatatcctccgcagtacgttcgccgatcagcagcttgtactcgcgtttgatataatttaagatttccatgtcaaacttgtccccagccattttaatagaagaggaggtgacaatatcgcccattgaaataaccgcgatatccgtcgtcccgcctccgatgtctacaaccatgttaccgcttggctggaatatttccatacccgcgccgatagcggcaactttaggttcttcttcaaggtacacatgtttcccgccgcttttttctgcagcttctttaattgctttttgctcaacggatgtaatattcgtcgggcagcaaatgagcatgcgcggctttgagaacaggccttttacattcagcttgttaataaaatgtttcagcattgcttctgttacttcaaagtcagcaataactccgtctttcagcgggcgaatcgcaacaatattcccaggtgtacgtccaaccattcgtcttgcctcttcgccaaccgccagcactttgccgctgtttttatcaagtgcaacaacggaaggttcattcagaacaattcctttacctttaacatggatcagtacatttgcagtaccgaggtcaataccaatatcccttgcaaacatctatttatatcctccttgaaaatctgtttcacagtaaatatccacattgtgccctaattatatatattatcataaaatatagaaaaaaagttggaagcacaataagttctttacaaatttttgcggatgttttatgaacgatttcaagaaggcaatgccaggtgattacgattgctgaacaggctctccttcgagaatttcatcttttttatatttgagctttgtcgcttctcctcctcttaaatgcctgatggatttatgataatcgagtatttctttcacttcgtttgccaagtcggggttaatttcaggcagacgctctgttaaatccttgtgtactgtacttttggaaacaccaaattccttcgcaatgacacgaacggttttctttgtctccacgatgtacttccctatcttgattgttcgctctttgatgtaatcgtgcacaccactcgacctccctaaaatggatgtgagaagtgtgaaatgagatccgtattctgtaaagagtcgttcattatgccgcttcttcgttgtatggttttaaaagtaagtttgtgaaatatgcccacgatccctcacctcaaacactctctttgttaggtttgtaacagtgtattagcattcttttgggaatatgctaaaaactcaataaggacaaggggtgaaacgaactttttcagattcagcaaactatttcgcgtcactaaattttcatctttacaactattgatcgctcctgtaaaatgaaataagcaattagttacttaggtaagttttttagaaggagaccgacatgtcctacgtcaacagacacctcattcatcaaatcaaccaaagcgcccgcctgattgccaagaaagccaatgaacagctagagccattcggcctttattcatctcaatggtcagttttatattgtttgcgtacgatcggaccaatgactcaaaaagagatttggtcctatttaaatgtggaagcgccgactgtgactcggacgatcaaacgcctggaggagaacggctgggttcagagacggcaaggtgaagacaaacgggaaaaacttgttgtcctcacaaaagaagccgagaaaaaatacgaagaaatcaatgtgaaaatgttgaaattcgaggaagagctgcttgcagatttccgggatgaagataaagaagctttttctcatttattccgcatgtttttacaacaatgaaaataaggaagtgacatacacttgaaaaaagcggatgcgatatggaccaaggattttattatggtcctgcttgtcaatttatttgtgtttgtgttcttttatacatttttaactgtattgccgatctatacactgcaagagcttggcggcacagaatcacaaggcgggcttttaatcagcctgttccttctgtctgcgatcattacacggcctttctccggagccatcgttgagcgtttcgggaagaaaagaatggcgattgtatcaatggcgctcttcgccctatcatcttttctgtatatgccgattcataacttttccctgctgctcggattgcggttcttccaaggaatttggttcagcattttaacgactgttacaggtgcaattgccgctgatattattccagccaaacggcgcggtgaagggcttggatactttgccatgtctatgaacctcgcaatggcgatcggacctttccttggtctgaatttgatgagagtggtaagctttcctgtattctttacagcctttgcgctgtttatggttgcgggcttacttgtttcgttcttgataaaagtgccgcaaagtaaggacagcggtacgactgtattccgttttgcgttctcggatatgtttgaaaagggcgcactcaaaattgcgacggtcggtttgtttatttctttctgttattcaacagtcacatcatatctgtctgtattcgccaaatcagttgacctttcggatatcagcggatatttctttgtttgttttgcggtgacaatgatgattgcacgcccgttcacagggaaattgttcgacaaagtcggaccgggcattgtcatttatccatcaatcctgtttttctctgtcggactctgcatgctgtccttcacacatagcggcttaatgcttctgctttcaggggcggttatcggtcttggctacggatcaatcgttccttgcatgcaaacattggcgattcagaaatctccggctcaccgctccggttttgcgacggcaacgttctttaccttctttgacagcggaattgctgtaggatcgtatgtattcggattgtttgtagcatctgccggcttctctgccatttatttaacagcggggctgttcgttttaattgctctgcttctctacacgtggagccagaaaaaacctgcagaggctgaaggaaaagtgtctattgcagaataacttgtcagactgccgggaaatcccggcagtcttttttccattaaaacacggcgccctctcggttgaacgagagaacgccgcttatagcaattattcaatgacaggccgcgcaggtgaatcaggatctaacgaaaaatcataggacgcttcatcacgaaacatcggatcggcatatatggattgttgatcgttttttgttgcttttcgatacgaagaaaatgaatcatattctttctttttccacatccatatgccgtcttgatccgcttccttgtggtacacgttatgattgaccgtattaccttcgttttctgtaaagtcgtttccgataaataatctggaatcaccggccgtcaatatattcttttcaattgtgttgtttttcgtatcgtactgcagcagcagctgtccgccgtacagtccctttgtgtcattccggtacataatattgcgggcaatcagagaattgctggtgccgccccgctttttgtcatatcctccgattgaaataccggtgtacgcattgttgtacactttgttgtctgtgatctgaatggcatttgcatactttcctttgtgttcagacgttgcttcaatcccaatatcgttatcgtaaactgtgttgttcttaatttcgatatcgtgtcctccatcgacataaatcccgcccgctgagtattcatctccataagcaggattgccgtaagtcgagttttgataaactgtattgttttctacgactccgtttcgcacgtaatcgtttttatccgcggttccctcataaccaattagatcaatcccgatgttattattgttgcggaccacattgcctgcaactgtgaagccgtcgatattaccgttcagcacaactgcttcactcgctccaagcgtcagtttctcaactgtattgtcctcgattcggatgtctttcatgctgccagtcccataaactgcgattccgtgagcatttccttcatccgctgttgtcttaatcccccggatgtgattatccttaatggcgatatgactgctggaccctgatacataaatccctatagcagttgcttcctcagatgaaacagaaagatcttgaattgttaaaccgctgatggcaatgtcatgtttatcgtgaatacgaataagcggtgtttcatattcagcgttcgcaacggattcaccgctaatcacgacgttttcattttcatagtttcggaatgtgataggctttccgtccgtaccgctgtgctttacatcaagggtctcatgatacgtgccctcccgaatcatgacagttgtgccggcagcagccttctcagatgcgtgtgccaatgtacgaaacggcttttcttttgttccttcattttgatcactgccatttggcgaaacatacagataatccccagatccttcctcattcgcttttgtcttatcataaacgaaagcgaggatgacagacgttaaaacacccgccaaaagaataaaataccattttctcattttcgattcccatttcgttttagaatagatttctaaaaccattataaatgttctatttatggaaaaccatttcaaaaatatgaaaatataccgtctaaatagatcttattcagcctggcggacctgcgcatgttcaactgtttcaattgccaatgatgcaggcgggtgaacacgcatcagaacaatgtagaaaagaaaggaaatcagcacacctacaaaccaagaaatatcgtataagctcttcaatacaggaacatacatgccaatcagcgaaatcagcgctcctaacattgtggctgcaaacgcacggtaattgtagcccttccaatacacataccgtcctgtttcggaatacaggtcatctaccgagagctcacgtttgcgaatgataaaatagtcggccatcatcacgcctgccaccggtccaagcatgccgcctattaagccaagaaacgcatacacgcttgtcgcgctctccatcagcttccacggaaccgtaaataaagcgagcaacgctgtgataaagctgccacgtttgaaattgatatatttcggcagggcattcgctatatcataagcgggtgatacgatattcgccgcgacatttacagagatcgtggcgatgcagagtgtgatcacggacaagacgatgacataagggttatcaaaccgcgccaaaatatcgacaacatcccaaatcggctctccgaacgcgacctgcgagccggaggtcaccgtaatacttgcgaatgcgaacagcgcaaacgttcccggcaaaccgtaaaattgtcctttgatttgctctttttgtgtttcagcaaaccgtgtaaaatcaggtatatttaagatcaatgtcgcccagatgccgatgatgccagtaactccggcagcaaacggccagaatgtttctgaaaacgtatgaaactttcctggttgagagtatatcgggcccaatcctccagcaatatcaacggcccaccataccatgccgccaaataccagatacactaaaggccctgcccacacctcaaaacgtttaatcgactccatgccgtgatgcaatacgagtaaatgaatggcccaaaagaatacaaaggaaagcaaaccggacaagtgaatgccgagaatgttccactcgccgccaatttctccccaacctggccacatattcaaaagcaaaatgttcagtgccgtgctacccgcaaaggtctggatgccaagccacatgatagctgtaaacgcccttagaagcgcggggatattcgcgccgtatatcccgtaagaagcccgaatgatcactggaaacggcagcccgtattttgtccccgcatggccgtttaaggcaagagcgccaaataggataagtgatgccgtaataatgatcgccagcacctgccaaggcgaaaggccgatcgcaattaatcctcccacggtcgcgtaggtcggtatgttatgtatacatcccatccaaatggaggcaaagttcattgctttccacgtccgtttttcctgtcccaaaggcaccagatcttcattgctcagcctgttggattgctgctgactctcttttaatttcatagccggctcccctttccatattgtctatatgtcgtcacacgttatgttttttgacattagatgtcacttaatataactgaagagtcagacaataacactggctatgatatacaattttcccgtttgtatttgaacaacttaaacaagaaaaagagacagacctcagagcccgtctctttcttaagatgcagttttcattaatgcagcaaatctcacagccattaacaggcttgctccgcccgctataatcataatgattcccatcatatcaaaatgggctgccgtgatttctttaccaaaaagaatgccaaggatcaccgaagacaaaatcgatcctaggtaacggcaggtttgaaacaggcctgaagtcgttcctaccatgttggaaggactcgtttccagcatcgctgcctgaagcgcgacattgcccagtccgtagcctatacccaagagcgacagaatgaggcctttaccgatggtctggacattgataaaaaagatggttaagagcacggctccagccgtcatcaaaagcgctcccgcaaagatcggcttgacgacaccagatcggtcgatccatttgccggttagaggtgacacaacgatgctcattccagacataaacagcataaacaggccgctcgtttgaacagaaagatgcatttcatcctgaaagtaacttggcaaaccaaaaaataaacaatagaagaaaacattcaataaaataaactgaacatacacggctgacaggtttcgctgtgttttaaacagacggacatcaataaacggcttatccgttttcagctcgcgccagacaaacgcacagagcagaagcaagccaagcacaccttcaaccgcatgcggcgacgtgctgaacgacagcaaaaaggatagaaggaaaatgattcccccggcaaataaaacaattccaagaatatcgagctgccgaataatggttttgattcctgccccttttttctgatctttcgggaacatatacaggcccaataagaagctgaggataataaacggcaaattaacgataaagatcgccggccagcctccccatacaatcaaaaacccgccgactgtcggccccagcgccgtcatggcggacgcaaaaatagagagtacagccaaggctgaagcttggcgctcatgaatatgattccgaatcaagccgacacctgacggataaatcgcactgctccccaccgattgaaacagccgcatgaccaataatgtcataaacgtcggcgcaaacggcgccccgatggcagaaaccgcaacaagaataagcccgaataaaaacaagcgtttccgcccaatcaaatcaccgagctttcccgttacgggctgcgctacggcactcgccaagtaaaacgaggaaatcagccaggaaaccgttgtaaacgagaggtgaaactcatgctggatgctatggagcgcaagagagatcatagacgagttcagcggattcagcattgttcccgaagccacagctgttaaaaaaacagctcggctttttttcgataacatcatttcacttgttccagaaactcttccgttgtccgcgatttaccgattctcgggaaaataaagcgcagtgtggcttcatgctcttcatcgctaaatgtggacatggcatctgtaataaaaatctgctgatagccaagctgaaatgcctcccgtgctgtgctttccaccccgatattcgttgcgatgccgcacaatacaatcgtatcaatgccgcgacgtctcagctgcaagtctaaatctgtgccaaaaaaagcaccccattgccgttttgtcacagtataatcgccatcctgcacaccgatttccggaacaaattcggcccagtccgccggcatttcccctgaacctccctgcgcaggctcatccgtttgcggcttcagggcgtccgctccatcatgaaaggctacatttacaaagctgatgaacccgttatgtttccgaaattcatctacgagctttttcacgttcgggacaacctggccgctttgatcaatcggcacaatccccttttgtaaatcaatgataaccaatgctgttttttgaaaatcaatgttgagtgtattcatcatacgtctcctcctgatactgttagtgtttctcacattgcatattttactcttcacactgcctaagttcttttatgatgcttgtgaaattctcagaaggagcgttttctcatgatttttcttttatgtaatagtaacaggttgtgcatacgaacaaaccggcaagcacagtaatcataaggggcgtcatcacttcatcacctgcctgctgtctatcggttcctgcctgaaaatgcccatgaatttgcggcggtccatccaaagcaggataagacacataaccattaatatcgtgctaagatcctgcacgccaatgtcaaaacaatagttaatcaagacgatgttcacaataatgggcataaaaataaccgcccctaatgcagccgttcgcggaatcagtaataaaacagctgccaggatttcaccaaaacctataaacagttcatagacatgagaataaccgaaaaatgtccacgcgatcgtaaaccccttcccggcagccgcctcgatttcaggcgtcacctcgccaaactggccaattaccactttcgccagaccgtacacgaaaaaattaaaggctaaaaacaatcggaacgtcgcgggaatcgacttgcgtaccgctttcctcagcctgccgcctttcttcatcatacatccccctcagtgtattatttgatatagtacacttaatacagtatatagtattctaattaatgtcaattcccttttcagctcatatgaatagctgcttttatagatacaaagtcttatatcgtaaaaaatgtcgttctcctttctttccgtccctcgataacatttcttaaaaaccatgttaggaaatcttacacgaaaatgttttatcattcttttttctctataatgaagaaatataataattgctttttattctgaaagatacggaggaatgagacatgcaaatgggcgatacagtttttatgttcttttgcgctttactcgtgtggctgatgaccccgggattagcgttattttatggaggaatggtaaagagcaaaaatgtgctgagcactgccatgcacagtttctcttccattgccatcgtttccatcgtttgggtgctgttcggatatacacttgccttcgcaccaggcaattcaatcatcggcgggctggagtgggccggcctcaaaggggtcggatttgatccgggagaatacagcgataccatcccccactcgttatttatgatgttccaaatgacgttcgccgttctgactacagcgattatttccggggctttcgcagagcggatgcgattcggcgcttttcttttattctcggttttatgggcctctttggtttacacacccgtagcgcactgggtatggggcggcggctggatcggccagcttggagcgctcgattttgctggcggcaatgttgttcatatttcctccggtgtggcaggacttgttcttgccattgtgctcggcaaacggaaagacggtacagcgtcttctccgcataacctcatttacaccttcttaggaggagctttgatttggttcggctggttcggctttaacgtcggcagcgctttgactttagatggtgtagccatgtacgcgttcatcaacacaaacaccgcggctgcagccgggatcgccggctggatcttagtagaatggattattaacaaaaaaccgacaatgctcggagcggtatctggcgcaatcgccgggcttgtcgccattacgccggctgccggatttgtcacaccgttcgcttctattattatcggcatcatcggcggggcagtttgtttctggggagtattctcgcttaaaaagaaattcggatacgacgacgcgcttgacgcctttggcctgcacgggatcggcggcacatggggcggaatcgcaacaggattattcgcaacaacctctgttaactcagcgggcgcagatgggttattttacggtgatgcaagcttaatctggaaacaaatcgtcgccatcgccgccacttatgtttttgtatttattgtcactttcgttattattaaaattgtaagcctcttccttccccttcgcgcaactgaagaagaagagtcacttgggcttgacttaacgatgcacggggaaaaagcatatcaagattctatgtgaggagtgacgctatgagcggtcaaatgttcaaggtagaaattgtaacgcgtccggcaaattttgaaaagctgaagcaggaactcggaaaaatcggagtgacctctctgactttctccaatgtacacggctgcggccttcaaaaagcacatacggagctctatcgaggggtaaaaatagaaagcaatgtatacgagcgtttaaaaatagaaattgtggtcagcaaggttcctgttgatcaagtgacagagaccgctaaaagggtgctgaaaacgggatcacctggtgacggtaaaatatttgtctatgaaatcagcaatacgatcaacatccgcacaggcgaagaaggacctgaagcactttaatatcggtacgagattcggacactccggatctctttttttgtgcacagaatcccccccagaaaccgcgattcctcttcgaattctcttcaagcgccgttatttcagacaatctctatttttatttgaaacttttcatgagtaagattagtctactaaatataaaaatgtaaaaggtgattatttgaactacgaaatttttaaagcaatccatggactatctcatcacaattcagttctcgattccattatggtcttcatcacggaatatgccattgtcgcctatgcccttatcctattggcaatctggctgttcgggaacacacaaagcagaaaacatgtgctatacgcaggcatcacaggaattgcaggccttgtgatcaactatttgattacgcttgtttatgtcgaaccgcgcccgttcgttgcgcatacagtgcatacactgattccgcatgctgcggatgcttcatttccaagtgaccacacgacaggtgcattagcgatttctattgcgatgcttttcagaaaccgcaaaatcggctggccgcttgtcatttttgggcttttgacaggcttttcgagaatttgggtgggacatcactatccggtagatgtattgggcagcctcgttgtcgccatcattatcgggttccttttctttagattttcagatctgcttcgcccgttcgtcgatttggtcgtgaggatctacgaagccattatcaataaactgacgaaaaaaccaaccgatcaaaatttctaagaaagacaaaagccggcgtctgaaatcaagacagccggctttaatatttctcatacatctcttgttttcttcgcttcgccaacacatataaaccataaaacaacccaattccaacagcatcgatgagcacatcccggatacaaccattcctgctgaagaagagctgaagaacttctgtgaaaaaagcaaacgcaaatgagccggctgcagctgatcttatgctgccccgctgtttccacagcaaatatgtcagcacaaagaaggaaaacgcgtgtccgattttttgaataaacgcttcaggtacagtaagctcagtaaaatccataactaaaaattgagacagatcagggtgcggctgaaaatgaaaagccaccgtttgcgatacgaccatgccgctgaagctttccgtacagacagaaagcaggataaaaaagatccagcctgcgagcaataggcggttcatgacataacctcctttataacgtacgtgcctacatgtaactacatagacggtaaaacaaagcaaaaagtaacagaaaaaaacgcccatcacaaggatagacgttttcttcattaagactgttcagtgtcttctgttgtgctgctttctttagaaccagatttgtcagttgaatcatcctttttctcaccggatttttcttctgttcctttttcagttgatccgtcctttttctcggaagattgctgaatggattcttctgtttcttgggtggcagctttttcttcagcagctgctgctttttcaatagaagaaactggtttgtccataaagtttaacggattcattgcaaccccatctttacggatttcaaagtgcacgtggtttccgctgtcttcactgtaaaggttcttgccagattttccgatcacttgattttgttttactttgtcaccttgctcaacgcttacttcggaaagagattgatacacagtcgataaaccgtcggcatgttctacttccacaacatatcccagcactggatctttttcagctttaacaaccgtaccgctcagagaagcagagacatcgaaatcttttccgtctttctcagctaagtcaattcctttgcttaggctgtacgtgttattataggtaacgagtgctgcttctttctcttcttttgcggcatcggtttcatagaactttttcacaacagaaacgttttcagaatcaacaaccggcattgcgacattttccattgactttcctacttcaactgcatcgtcgttgttgtcatatgcggagtttccgccgttatcagccaactgatcctttacctcatcatttgatactgattgataccaaaggacagctgttaaaatgacggccgcactgactaagtaaattgcagggaacacccagcgtttacgaaaaaactgctgaagttttttgacttgagaagttttcttttcttcctctctcattgtttcatcacctcagcaacattctgaacacttttctgaaaatatatacaacctatccaaaaaaacttttttagatgtagtttgcacagactgaacgaaaatatgtatttttttgagaggagtgccaaaaacgtatgaacatgacattgcgtcttgctgaacatagagacttggaggctgttgtggcgatttataattcaacgattgcttctcgaatggtaacagccgataccgaaccggtaactcctgaagaccggatggaatggttttcgggacatacagagtcacgtccgctctatgtggccgaggatgaaaacggaaacgtcgctgcctggatcagctttgaaacattttatggaaggccagcctataataaaacagcggaagtcagcatatacattgacgaagcatgccgcggcaaaggtgttggatcatatttgcttcaagaagcgctccgcattgccccgaatcttggcatccgctcacttatggccttcattttcgggcataataaaccaagcctgaagctgtttgaaaagcacgggtttgcagaatggggactattccccggcatcgccgaaatggacgggaaaagatacgatttaaaaattttagggagagagctttcatgattagtctggataaagatgaaaacgaaattgaacatcataatgaagaaaatagccttgttgaacaggagactgcacctgttggacaggagagccgccagctgagcgcctccgctgtcaagtcgctatccgacattgccaagtggggcaaaatttctggcatcttgttaatcattatgggatcgcttgtcactctgtctgttttgatgacagtgattggcgccatcccgggcgtgctgctcattatatcaggcgtatttttgatgcgctcagcaaaagcagccgcggaagccgaaggaaatctagccggcagcgctggcgaaagcatgcttgaaaattacgggacatttataaaaatgcagctgttttatgcagcatccagtatcgttactgtcctgatcgggatcattgtagccattttcgtgctggtggtaatcggcattgctgcttttgagaacacgccttcgtatgatgatccggattcttattattatgaggatgatccggtgtttgaataatgatgagacaggacagggcatgagttccatataaacggaaccatgcctattttatttgactattcaaagcaggccggcgtaaacaccaaatcctgaagcaagtacaatagacatctctagtagaagaaatcaacaaagcaacgctgttacccagaaataaataacaaaaaaactacctatgaggtcggaatctatctgaaaccgcgctttttatttcgggtgtctgcatgcaaaaaaacacacccggatcgtctggaaaatctcaacaatccgggtgcagatcttctttaatacatttttttgcgtctgtcttcctcagtcaaaaattcaacaaaactccgcatcgcaaaaggctcttcctttatttgccgtgcgtaggagcttttccgctcttctgaaaggatttcgctctttttgatcctgttcagcatatagatgtgaactgttttttggatttgtttatgctgatagcctgcctctttaaaaaatgcgagcccgagcgccgccaaaagagcgaatatgcctgcgctgatcagggactccctgtcagctgaagcatgaaatagaaaagcagctaaattaaagagagagaatgcagcaagcggaatagcaagaaaacggtaaatgacggtttttttcatgaaaggctgtacggccttttgaattttttgcatttctgttttgatgaaccccggcatttgttcgactctgtaaaagttcatataatcctccccctttatttgatgtttcaagcttcacgaacgttacatatgtgtttattttaacgcaggtgcaagctggttttaaagaaatctgcccgtatttttcacgaagaatctggatcgccgctctttattcttttaaaatgtgagtgttataatttgtaatgggaatcagatcactgttattcatggaatactaatggcaatcttcttgataaatatgaatgagcggggttacaaagtgagtatttcttccatccttttatcactttttttcattttaaatattcttttggccatcattgtcatcttcaaagaacggcgcgatgccagtgcatcttgggcgtggctgcttgttcttttctttattcccgttttaggctttattttatacttattattcggccataatctcagacgcaagcatttgtttcaatgggaagaccggaaaaagattggaattgaaaggctgctgaagcatcagcttgaagatttagaaaccaagcaatttcagtttaacaaccgggcaacctttgataacaaagatttaatttatatgctgattatgaataaccatgctgtgtttacagaggataattcagttgacgtcattacagatggacgggataaatttcagcggctgctgagtgacatttcaaaggctaaggatcatatccatttacagtattatatttataaaggcgatgaattaggcaaaaaattgcgggacgctctcatccaaaaggcgaaagaaggtgttcaggtcagagtgctttatgatgaactcgggtccagaacgctgagaaaaaagttttttaaagagcttcgcgaggctggcgggcatgtggaggtctttttcccgtcaaagctcaggccgattaacctgcggctgaattaccggaaccatcgaaagcttgtgatcatagacggtatgaccggttatgtcggaggctttaacgtcggagatgagtatctagggcttaatccgaaattcggttattggcgggatacgcatatccggctgcaaggaacggccgtacacgccatccaaacacggttcatccttgactggaaccaagcttctcatcaccatacgctgacatatattccaaatcactttcctgattacggcccaaaaggcaacgtcgggatgcagattgtcacaagcggccctgattcggaatgggaacaaattaaaaatggctacatcaaaatgatttcgaacgccaagcgttccattttgatacaaacaccttattttatcccagatgcaagcctgctggatgctttaaggatcgcttgcctttcgggcattgacgttaacattatgattccgaacaagcccgatcatgcctttgtatactgggcaacactttcgtatatcggcgatctgctgaaagccggagccactgtctatatttacgataacggctttattcacgcgaaaaccatcgtggtggatgacgaaatcgcttcagtcggcacagcgaacattgatgtccgaagcttcaggctgaattttgaggttaatgcatttatatacgatatcaccattgctaaaaaactggtttcaacttttaaagaagatttgctagtatccagaaaattcacctatgaggagtatctgcagcgcccgttgtggattcgaataaaagaatccgtctcgcggctgttgtcgccgatcttataagatgtgcaaacccccggcctttacggccgggggttttcctgatggtcacagtaaatgatgatcgcctcccgcaaaaaagcggcaagaccttctccatattgattgattgaatcggtaaatcgctcgtcagtgatatacacttccccgagtcctctgaaaatgtcgagtgtgcaatcgtaatgatattggcaaatatgatcgcgaaatgcccccactgcggcctgaacctctgcatcatcgggcccatgcttcattcgcgccgcaattcgtctgtaaatcgaatcaaattcagccatgatcgagcgccaatcatctgccgagtatgcagatgtccttttctctgtttcttctgcgatttccttaccatacagctttctgacttcgtcagcgtatgtctgctgatgctcttcaatgtctttcatgcttaatccggcaaataaatccctcttattcatcgtttcccctccatcaacggacaaaagcgtcctgtcaattgtttgaatcatctcatccattctttgttttttcttcatcaatatctccttttgcgactgaagtgccgctttccggtcaaaattcggatgatccagcatctccttaatctcatccagacgaaacccgatttccttgaaaaataaaatctgctgcagtctttccaggtctgcgtcactgtacaaacgatacccagcatcagtaagcgctgaaggattcagaagctcaatattgtcatagtgatggagcgtccgaatgctaacacctgatatctccgccacttgtttaacttgatatttcatacataacacctcctcttttttatcgtaaacaatcacgcaacgttagggtcaatccccaaaatgttattttctatatacaaaacttctcacaaatagtgtataaaagaaaagtgagtatttttttgtaaaggggagccagtatacatgaatcctgaaacaatgaacaaaaccctcatcagcatttcgaaatggggaaaagctacaggcattttatttattattatgggcgcaattaccgcgctttcaggcgcgttcttttttctaatcggtgccgtgccaggcgtactgcaaattatttccggtatctttttgatgaggtcagctagggaagcaggccaaatggctgaacacaatagcggacagtctgaagacttaatgctggagaattacgcgaaattcgtaaagatgcaagggatttatttgatcgtaagcattgctgtatccattcttgcgattatcgccttcttcatctttttaatgcttgggattgctgacggccttttcagcgatacgtacagcacttattaatgagaaaaacccggagctggctccgggttttttattattccgcttcgcttaccactgtgaagcgttcatttttgtgttcgggatgttcaagctcgtccaacacggcaatggcataatctgcatagctgatatagctgtcgccttttgcatttacgatgacattgtcttttcctttttggtaagagccagtccgttttcctgctggatcaaaaaatgctgcaggactgaggaacgtccaggaaatgaagtctgtctgctgcaaatctttcaggttctctccttgatttgatgcagttggcaaatattctttcggaaattccggcgtatccattaaacgggttgttttggcttcatcaacaaacaggcttcccgctccgccaacaacaagcaatcttgtgcgcttcgcgtcctttaagatgttgatgagtgctcttcctgcttcaacatgaagatgttcttggccgggtgctgctccaaaagcgtttacgactgcgtcgaaaggcttgatgtcttccgcagtcagttcaaacacatctttttccaaaaccgctacgtcctgcccctgcacttttgaagcgtttctgacgatggctgtcacttcatggcctcttgttttcgcttctttcaaaatttcgtttcccgctttcccgcttgcgcctataataccaattttcatttttcatttcctccttatttgtaacaattttagttacatgttagcggtgagaagtcatcccttttgattaaaagagatgattcataacatcttttaatgacttgcttgccagttcattttccatcgctctttgcacactttcaaacgtttcatccagagcgttctgaatttttttccctaccggacatttcggattcgggttttcatgaaccgcaaagagttcttcttgcttttggacagcccggtacacttctaaaagagaaatatcagcaggatcttttttgaggcttgcacccggcacccctgcgcgtgatgtgagaatatcagcttttttcagcaggctgatcattcttcgcacaactaccggatttgtgttgacactgtcagcaatgatttctgaagatgttttttcatccatcgagatgagggataaaatatgaatggcaacagcaagacggctgttaatcatgttttttcaccaccgttgtaactataatagttacatttgattcgtttgtcaacatctaatatacactaaatacacgggttttgtgcaccgtttttagtcaatagaacggccggatgcactccggccgcgtcttatcaaaataagaaatatctttgtccaagtgggacataatcgacaggctggcaagacaattcctccccgtcagcaaagacctgataggtttttggatcaatctcaatctttggcaaagccgaattcagcttcatatccagcttgctcagctttctgatatttttgactggagaaatccttttttccagccctaagctttctgccacaccacgctctatgcttgcctgagacataaatgtaatcgaggttgagcggttggcttttccgtaagacgcatacatttggcgcatgaaaaccggttcaggagtcgggatggacgcgttcggatctcccatttgcgcacgtgcaatcatgccgccctttaagaccagttccggtttcacgccgaaaaataccgggtcccacagaacgagatcagcaagcttccctttttccaccgagccgacctcatggctgagcccgtgcgtaattgccggattaatcgtgtatttggcaatgtaccgttttgcgcgcacattgtcattcccgttttcaccggcaagagcgccgcgctgttttttcattttatcggctacctgccatgttcggatgatcacttcaccgacccgccccatcgcttgggaatccgatgatgtcatgctgatcgcacctatatcatggagaatatcctccgcggcaatcgtcgccgccctgattctggaatggctgaatgccacatcttcaggcactttcgcatctaaatggtggcagaccatcatcatgtcaagatgctcatccatcgtattaacggtataaggaatggttggcgttgtagatgacggcagaatgttcgcgtaagaggcgagcttcataatatccggagcgtggccgccgcctgccccttcaatgtgataagtatgaataacccggtccccgatcgcgtcgagcgtgttttccaaaaagcccgcttcgttaatcgtatcggtatggatggcaacttgaatatcagcctcgtccacgacttccatacacgttttaatggcgcttggcgtcgtgccccagtcttcatggagcttaaggccgatggcgcctgcttccacctgctcgatcagcggcgctttatcggatgcattcccttttcctaagaagccgacattgatcggaaactcctcggccgcttccagcatcctcgccatataccacgccccggacgtacatgttgtcgctttgcttcctgtagcgggtcctgttccgcctcccaaaagggtcgtcacacctgaagaaagcgcaacttccatctgctgaggacaaataaaatgaatgtgcgtgtccactcccccggctgttaaaattttgccttcaccggaaatcacctctgtccccgctccgatgaccatgtgtggatcgactccatccatgatatcaggatttccgctttttccgacaccgacaatccggccgtctttcacaccgacatccgctttgacaatgcctgtgtaatccaatagcacgacgttggtgataactaaatccaaagcgccgtccttccctgtgattctgccgttttggcccatgccgtcgcggattgtttttccgccgccaaagatcatttcttcaccatatactgtgaaatccttttcgacttcgatccataaatccgtgtcgcccaatctgattttatcgcccgttgtcgggccaaacagttccgcatattcctcccgtgacattttcatcggattacaccctccatccagccggcttgttttaagttggccaacgttttttctttgccgcgttcatcgataaacgtgtcggccattccgttcagccctttaattgtcttgcgtcctctgatttccactagtgagaccgttttctgctctcccggctcaaaacggaccgacgtgcctgatggaacatcaagacgcatgccgatcgccagctcacggtcaaataataaagccccgttggcctccgcaaaatgaaaatgcgaaccgacttgaatggagcgtgatccggtgttttttaccgttacctcccgtatctcacgcccttcattaatcgtaatggttccctcagcaatttgaaatgctcccggcttcatgacttcacctccgcagaaattggctgatgtaccgtaacaagctttactccatccggaaatgtggcctccacctgaatgctgtccagcatctcaggcacaccctccatcacatctttttccgttaatacatggcggccggcttccatcagctctgctactcccttcccatcacgtgcgccttccataataaagcaggtgatataagcagcagcctcaggatagttcagcagaacgccccgcgcctttcgctgtttggctaattcccccgctgcaaaaatgagcaatttctcttgttcaactggtgtcagtttcatctgtagtcctccttcttttgtcatataaagcagatgcggctactacgaatttgcggaacagtcaggcgggacatcacctccctttcttcgggaatgggggtcatacggtaagatgcctttcaaagcggcatgccgtttcttcatcagccttgccatggtcaacaaccgttcccctgtcgatcacggaaagatcagattaacgcgttttccagactgcgctcgactaagataacaaatgtctttttttctggaaatttctataataacttgtctgactagttcgacaattaaaatctgaattccttccaattgtttattaagtaaaatatttttcagatttaccatcagcgctctggcgattgcaagctgctgctgttggccgccttttcgctttgaacaaacgtttgattaaaataaatagcccccctgtttagccggaagcaggcctatggagtggatggccgactccatttcggcctaatacagcgacaatctgccccgggcgaagctaaggctgtgcaaaaccatcgattgatcataaccagacgttacattcctgatggcagcccgttgttttgctccgcaaccggaagtatggcatggaggccagtctgaggcgccgacctccacgataccgagaacccaactattgccattaactccgcatcatggacggtcacttcgctgatcgccaccgttcctcttaatgagtgaagaattccggccttcactgaatccccgcttgtgtcgatatcaactgttttctcgcactcccgtggcttccgacactttcttcggtgcagtacattcagccatcaaaacccctttgtttgatttcttcaaatgatgttataaaagtttacaacttatgtcatcattatatagaagaggcctattaattcaaagaatatttaaaaaatttagttaccttgaccaaatcagcttctttttttgttatatttattcacatcagaaaaagcgaaaaaaaaagacaagaaacatttcgtttcctgcctcttccgtacgattaatctttatctgaaaatttatccttggctttcccgatatccttttggatttcgccttttgccttatcttttttgccttcagcctgcatgtccgttctgtcagccatatctccgactttatccttcacttctcctttggctttattgaagccgcccttcattttgtcttttacactatcgttacccatgttaattctcccctctcaattatgtgtgtacttgttaacttcccgatctgagaggcaataaacattctaatgttatttatcgatttcgtagcgctctccgtaacggagcaccttgtatatcgccagcccgtctgatgactttttctccgaatatcggaccggcagcagggcaaaaaacacataatacgtagaaaaatagacaaactgatagaaaaacacattcggctttaatacactgtgtataatcagcagattgattgcaaaaatcgtgatgaggttaaacaagcagcctcctgcatacacgagtgcatttgagaatcgattgtcaattttcaactccccgtaccggcaaaaagaatcgataaaataaatcgttctgaaccgtatgggtccaattttaagcagcgtttttcccatgcctatatccaacgatccctttccgccaaaaataaaagccataaagctgtgccctgaaacatgtataatctgtacaagcggcagaacaatgaggaaagaccacagaaacttcaccatatcattaaaaccaaacattgaattccccctcacatgcatatctgcatcccaaaacggcttttgttcaaaaaacagtgctgtagcgatttttcctgttctccccggaaataaacgttccgatgctcccctttttttgcataaaaaaaaaccatctgccagcagatggttttgtctcatacttcatataaacaatcgttcctttgaatcatctctctcatgctgaccgctttttcataaaaatacaccgcttctttatattgttcgcgatgactgaaataagaggcagcatctaaagcaaattcttcaatatatacatacaggcccttttcttccatataatcaaatacttcttgaatcatatccaaattgacagattccacatataatgcctgcagaaatttatattttgccagactgaagaagtcgtttcgtttttgggcaatggcaatccctttttcatagtaccgtatcgcggcttcgctatcttgttttttgaaaagaacgcgagtcaggctgaagagcgcttttggaagctgttccagctgataatcctcgaagacaggaagcgctttttcaaagtattcggcggcctgatccagctcccccttgtcatcatagcaattcccgatattataaagggctgatccgatcaaacggggctgtccttccaataaagcaaggcgatacgcgtcatccaaatgctcaagcgctttttcataatttctgtagtctatgtagtttcctgatatgacgaaatggcattgaattcttctgactctataaaaatcgtgagccttatacgtctccagcgcctgtacagcgtggttcatagaaaagtgcgtctgcttcataatataaaagacttccgccactttaaaatgaaattccgctctttcaatttcatcttctacaaacgcaagcatcttctcagctttccgataaaaggatatagccgagatgtaattgttctgttcaaattcgtacattcctctaaacaagtgaaaataatactcagataatccggagatgctgtcctgattgctttccagcgttttgatcaattcacgatattgaagctgagattcctcgtgcaggtcaggctttacgtaatccagcataatttggtgccggtagctgatcagctgataatacaggagaagcagctgatcctcttccatctgttcgatatctagatcaatttcttctttcagctttacggcatcagccacttgaaatgctaaaatgtgcttataccacttattgattttcactcctacttgagatgacgggatctcgtacgcggccatgcccctccaaccctttctattttctaattggttatattttatcataatgtatggctttggaattaaattttcttacaatgattccttctttatgcctatccttatatatttcggtttttctacgtattttttgcactcggattctaataaaaaagcttaccggacagtgccgataagcttttgacttcaaattaaccgccaatataagacatttccactttctttttgccagatgcttttgatagcgtacgatcgactgaatactgatcgatccgatttttccatactgtcccgatcatttctgatagttcgtcatcacttaattcctggcgaaccggagctctgaggtcaaatccgcttgaagcgaataagcaggtaaacagctctcctctcgcagaaagacgggctctgttgcaagatccgcagaacgcatcagatacagatgatatgacgccgatttctccggagccgtccaagtagcggaatctggaagccacttcgcctatataattaggcgctatcggctcaaccggcatgtgttcattgatcaaatctatgatttccgcctttgtcatgacgtcttttttttcccattggttggtgttgcctacgtccataaattcaatgaatctcaggatatgccctttttctttaaaataacgggccataggcagtatatctttttcattgacgcccttttgaacgaccatattgattttaacaccgagccccgcttgcttcgccgcttcaatgccttccagcaccttgctgacagaaacaccgcgcccgtttatcttcttaaaacgctcgtcttctaaagaatcaaggctgatcgtaacccttttcagcccagcctccttgagcctcttagcataaacaggcagcagtgatccgtttgtcgtcatcgcgatgtcacgaatacccggtatgcgggccagttttttgattaattccggcatatcctttctcatgaggggctctccgccggtcaagcggattttttcaacgccaaatcttgtgacaaacaatgtcgcaagccgttccagctcctcaaatgaaagcagctcctctttctttaaaaaaggataatccgggccgaataattcggcgggcatacagtacgtgcatcggaagttgcagcggtctgtaacagaaatgcgaaggtctctcagcggtctgtttcttttatccaacatctgacgcgactctgtaatcatagctacagccccttcctactccctgattctctcagggtgtgtatatacattaaatgatccgtttctgacaaatccaatcgctgtgatattcaattcttcagccatttgaatcgcaagctccgtcggggccgatttggaaatgacaatcgacacgccgattttggccgcttttaacaggacctctgatgagattctgccgctgaacacaatcagtttgtcgcgtacggacatcccgtttagaaggcagtgcccgtatagtttatcaagtgcgttgtgccgaccgatatcggtgcgcatcaacagaagcttctctgtgtcgcaaagcgccgcattatggacgcctcccgtatcctgaaacgtcccgctcccttgctgcatgtctttcataagcgccagacatgcctcaggcgatatcttgatttggctgacagccgtcttggctgttttgacatcctgctgaaaataaaaatgacggccctttccgcagcatgagccgatcacccgtttcgtataatccttttgatccaatgtctcagggtgaacgaggtcgacatatacaaaaccgagactttcatctattgtaaaccttttaatttctttttgaaatcgtataacaccctctgatgcgagaaatccgatgacaagctcttcgatatgctcaggcgtacaaacgagcgtcacaaattcactgccattcagtatcactgtcaaagggaattccgtcaccatccggtcttctactttgcttatttccccttgttcatagcgccatacatccctgaccgcagttactttatcgttcaatgtctcttcccctccgcaatgttcctgcctttatattttttcacactcctcggattttgtcgaattctgagacacaaaaagagccctctatataaagggctttcacaggatgtgatgacggcggtgtttaggcagggcgcctaccgttccttttataacacgtgagcaccaatgtgcattgacaacaaacgcggggtttgtcgacacgctgagagccctctatagaaaggactctatggttgattatactgattcttttttagaaccgtaaacagcacaatagctgcgatcaaggtgagaatgctgacaaaaaagaaggctgccagttttagaagaacaccaagcaatatgaatgcaacggtggctataagaaaaatcattccgaataatttcatatgttcaacccctttttagggtatcattcccgcccaaactgtttttaaaccaataaaaaaaggcgcctgggggagcgcctgatctttaggttccttactcagtaaatttttgtgcttctttttcccaagcctgttcgaactcatccgcactgttcgctgaaatatattctccgccgccagcgacagctgcttgtttcatctcttcattacccttgacatcaaagttgaagccaatgatgtttacaatcgtatccacatttgatgcacggagcttttcgatttctgccgcagggtctccgccgcacgtttcttcaccgtcagtgattaaatacaccacgtttttcccgtctgcgtcaaatgcctcaaattcttttcttgtgtctgcaagtgctttggcaatcggtgtccatccagtcggcttgagctcactcaatgaattgtcaaacagggatccttcatatggatgaaggccgtaaatagtttccgtcgtactgcacgaaagggctttaccggacagtttattattccctgcatgcccgaaaacgcgaagcataagatttgtatccttcggaagaagttcggcaaaagattttactgattttttggcaatgtctattttgcgctctcctcctgttttttgaaccatacttccgcttccgtcaaacaaaacagctacatttgtatcagcctgtttctcagcggcaaaagacggggaggcaatggaaacagtcaacaatccaatgataccggcagccagcaattttttcatatgattacttcctttctttttcatattttccaactatatgttggattcttctttatgctagaatacgaaaatgcaaaaagatataggacatgctgccttttgtgctgctttcacgatctgtccaaaatcgcttgaaatgccgttcatttttagccatttccgcccagaaagcataaacagattgtgtgatcattcattcttttttcgccttgattatgacagaaaaacggaaatctgctactatgctacaggcagacagctaattagttttgaagtttttgttacatacaaaaagaggctgaccatcaccagcctcttttttcttatttagataacattagtgattgctgagtgaaaattttctcaacatctttttgggtataagccgggaagtattcaccgccgcctactttcgcaattgcgttcagctggcctttgtatccctctttataatcaaagccgatcacattaacagtgatattgtctttttgcagttcctttgctgttttaatcgggtttcctccgcacgtttcctcaccgtctgtcaacagatacaccactttttccccttttgcatcaagctggtcaaaagaagatttcgcctcgttcagcgctttggcaattggcgtccagccagtcggcccaattgtattgagagaattgaggaagctttgctcgttaaagctttggaagccgtatacgttgcgaatggcttcacatgactgaacttttccggaatttttattgtttccttcagagccaaacacgctcattttcacctgagttccttctggcagtgagctcgcaaactttgaaatttcttttttggctgaattaaatttagatacaccgtctattcttttcgccatacttccgctggcatcaagcaagaccgccacgttcgccggcgctttagcctccgtttctgacttttcagctgcaaaagcaggtgaagttaatccaaaaagcaatcctgtcatcatgatcagtgaaaatcttttcttcatgttcgtacccctttaccaatttgtttctgcgtgcagatgttcaacgctgaacataatctatcgtaatcaacaaaaaccgagaaataaatagggcgggcttccccattgctgttgtttacttttgcatagaaacctatgtttttattagtgatttccacctaacgcccctatgaaaagagaagattgtccgcctttcggctttcgttatatgagtctgtcgaagtctgtcgacaaatgtggatgactttaccacaatctcaaagcctgaaatcaggaaaaaaggactgatccttaaagacggccagaagctcctctaaaccgtttcagccgctcttagataaaagacattcaagaacagaaaaagacgcccaaagagcgtctttttctactttttcgccatgtatttattcaaaaacgcatctgcctcagaaatttgtgtgccttggtaatagtactttacaatgtcatcaaccgttttgccttctttggccataaaattcgctccgtattggctcatcccaacaccgtggccaaatcctctcgtcgtgactgtaattgtgtctccatttcgcttccattcaaaatcggcggagttgagacccagcttttcacgtatgtctcttcctttcagcgtcttgccgttaatgacggcagttgcgacctggtggcccggtgtctcgccggtaatcttccctactgcgctagatccatccagcttgacgccaagcttttgctgaaattctgccgctgtaaaggttttcgttgccttatatttcggagactttttatcccatgggcttttgacgctttttaaatatgggatagcacttgtccaataagcttctgcattctctgtgtagccgttgcttgtggagaaaaaggatgcttcaatcggctggttgttgtacgttaagattttgccttgcgtactggctaccgcagctgtgattttcttcagttttgtctcatagcttgtgccccactgttttttcagctccgctttgtttttatacacctggaacatctgtgtatcatccaccagtgagcctttaggagcctcaaccgctgaatttgacaccatcagtctgacaataaatgttctggcggcgagggcctgggctttcagtgcttcagattcaaaggttgccggcatttcggaggcgacgactccaatcacatactcttcaagcggaatgttttctacggattgatttgcggttcgatagacgggaatagaaacaggtgatgctttcaatgtttctgctcctttcgatgctggtttcgtgctgactgctgtcttttctgattctacactggcccccgcttccttattatgctggaatggtataaccaagagtgtgggaaccaagagaatcaatgcacatagtacggatagtgtgattgcgaattgtttcatattcagctgcctcctgctcgggattcgactctagtctagtctatgggcagggacaagctaatatgactctcgttttggacagaaactttatttgtcatttacgtattcttttttgctattttgcgcataatgatgataatacacaaaaaataaaaaaccagtatgccagagtgacatactgattttcaagtaagtttatgcatttaagtcagaaacgacttctttattctcttgctcagaagcagactcatcatttacacgttcgatgtctgcgcccagagcggcaagcttctgatggaaatcaacgtaaccgcggtctaagtgcttcaattcagtaacacgtgtgtgaccttcagccactaaccccgcaagaatcagcgctgcacctgcacgcaaatcagtcgctgcaacttcagctccctgaagctgtacaggaccgttaatgatgacagaacgtccttcaatcttgatatcaccattcatacggcggaattcttccgcatgcataaaacggttttcaaaaacggtttctgtaatcatgcttgtgccgcttgcacgaagcagaagcgccatcatttgtgactgcatatcagtcgggaagcccgggtgaggcattgttttgatgtcaatcggtttaagctctttcgggccgatgacacgcagaccttcaccttcatccttaattgttacacccatctcttccatttttgcaattaaagaggtgaggtgttcaggaaccgctccttttactaatacgtttccttcagtgattgcagcagcaaccataaatgtgcccgcttcaatacggtctggaataatatggtgttttacgccgtgaagcttttcgactccttcaattttgatggtgccggtgccagctccgcggatttttccgcccatgccgttgatatagtttgctaaatcaacgatttcgggttcttttgccacgttttccagcgttgttgttccttcagctagagcggctgccataatcaggttctctgtagctcctacacttgggaagtccagataaatttttgcgccttgcagtcggccttttacttcagcttcaatgaagccattaccgactttgatttctgcgcccattgcttcaaaaccttttaaatgctgatcaatcggtctggaaccaattgcgcatccgcccggaagtgcaactcttgcatgacctgtacgcgcaagaagcggccccatgacaagcacagacgcacgcattttacgaacatattcaaaaggtgcttcagtttgcaaagcgtatgaagcatttacagtcacttcattattttcaaaatgcacatctgctcctaaatgacgcaacacttcgttaattgtatatacatcggagagcgtaggtacatcacaaattacgcttttttcttcacttgctaataaagatgcagcgataacaggtaaaacggcatttttagcgccttcaactttgactgtgccgtttaacttctgaccgccgcggacgatgattttttccaaggtattcccctccgcgtccctaaattctctatattaatattcagtcgtaacgattggtgtgccaaccgtaacggtatgttttccgcccattcctgcacttctaagtgcaatttgcaaattcattttatgtttcgaggtcataatgtactcttcccactcatctgtaaacgcagaaatagaaacgaaatttggctcaactacatgttctactgatcttgcttgaaattcatttaataactgatttgcttttttttgcaaaacaatattcatattatcatctaagtgaccatttagacaagtaaaaataactactttttcttggaatatcccaagtgtctcccgttcaaactgttcatatgtatcattccagctatccggtgtctctagactcatttgctcatataataaatacgaagttggattgtgttttttgagggttgtgacaagctgcagtctaaaagaagatcgattttttttgtcagtatatgtgccaattgcctttatcattttatcttcccgtgcaatcacccaatcatattgacgatactctgattttaaacgttgcactttttgataaaattctttttcggtcagtgacatgttttgttttgcatgcaatgtccacttatctattgacacatcttggcgttccatcccctctgccatttgtgctaacggcgttaattcactcgcatgaatggtatggaaaacagcaatgacgaagcttaacatgacggaaatgataatagcgcggcttacttgttttttcttcatgttcatctctcccccttatccccagttttaccggaggcaagaggcgccatacgtaaaaatcttcgtcaaaactcgagctattcgcttcattcaaaacctattaaaatagatagggaagctgctgtgaataattgagataatctaaaaagaaattggcaacggccgttccaatggcaattgtcagcaaaatcatcaggagtcttgcctgcacgactttgccttttttgattaacggatctatattgacggcttgcaacgcccaccaagtcactgctataaaaatcaggtgaacgacaatgccgattgcagcctgctgtcccaatacactcatctattacactcctttctctgcgttcataccctttcttattatataagaagcacagataaagatgatacattttatacagaacggaataatcacccaaatctagggctaatccccgcttaaagtgcgattcttttacatggtatactttattggaaaggagctggcaaatgtgaatcattctttttttcagcctgaaaagcaatatggtgaggacctgccaatttttgatcaggaatgggaagcaattgcattctattatgattatagacagtcacagattgaagaactgaatgaattgtgtcagttttttaacatttctcttacctatacgagagaaagccttgaagagcttgaaaacctctattttcaaagtatacaagaacttttgcttgctgattggaatcttcctattgaagaattcgagaaaatgatcagtgtttatcttatagattgtgtgattgcccgccatgaagatgctgaatgggttgtaaaaccttatccctataaagacggcgcttatacacttggctttagaagacatcgcaaatcgtggcatacaatgaatgcctgtgatggtttatacctgcgtccaaaagaggatcgcccgctgttatcgctgtttgattctcttgtgcgttcataaaaaaatccttctctttatgagaaggattttttcttatttccctgctacatccaatctgttcaaagcccgctgtaacgcaagctcagcccgacgaatgtcagtatcatctgattgagaattcaaacgctcctgcgcccgctggcgtgcagcttcagcgcgctctttatcgatgccttctgctgtctcggcagcctgggcaaggatggtgacctgatcaggacggacttcgacaaatccgccgctgacggcaaccatttcagtctgcccgtcttttttcagacggacagcgccgattttaagaggagccacggttggaatatggcctggcaaaataccgagatcgccgctttcggctctcacactcaccatttcgatatccgcatcgtatactgggccgtcgggagtaacgatattgactttaacggtcttcatgcttttaccctcctaggaccagattaaacttctacacccatttcttttgctttctcaacaacttcttcgatacggcctacaagacggaatgcatcttctggaagatggtcatatttaccggctaagatttctttgaagccttgtaccgtctcttttacaggcacgtaagatcctttttgtccagtgaactgttcagccacgtggaagttctgagaaaggaagaactggatacggcgtgcgcggtgaacgacaagtttgtcttcctcgcctaattcatccataccgagaatcgcaatgatatcctgaagctctttgtaacgctgaagcgttgactgtacttcacgcgcaactgcataatgctcttccccgacaatttcaggagcaagggcgcgtgatgtagatgccaacggatcaaccgcagggtaaatacccatttcagttaatttacgctcaaggtttgttgtcgcatccaagtgagcgaacgttgtcgccggcgccgggtcagtgtagtcatcggcaggcacgtagatcgcctggatagatgtaactgatccaacgttcgtagacgtgatacgctcttggagctgacccatctcagttgcaagcgtcggctgataaccaaccgctgaaggcatacggccaagaagggctgaaacctctgaacccgcttgtgtgaaacggaaaatgttatcgatgaagaacagtacgtcctgtccttgtacatcacggaagtgctcagccattgtaaggcctgtcaaagcaacacgcatacgtgcgcccggcggctcgttcatttgtccgaataccatggctgttttgttgattacgccagagtcactcatttcgtagaaaaggtcgttcccttcacgagtacgctctcctacgccggcgaatacagagataccgccgtgctcttgcgcgatgttgttgattaattcctggattaatacggttttacctacaccggcaccaccgaacaatccgattttaccgcccttaatgtaaggagcaagcaaatcaacaaccttaatacctgtttcaagaatttcaacttctgttgaaagctgatcgaatgaaggcgcctgtctgtgaatcggatcctttttcgcatccgcaggaaccggctcattcaaatcaatattttctccgagaacgttaaatacacgtccaagtgttacatcaccaaccggtactgagattggcgctcctgtatctacagcttccataccgcgctgaacaccatctgtagatgccattgcgattgtacggactgtatcatcacctaaatgaagagcgacctcaagcgttaaatcaatacctacttcgttttcacttgcagctggctgtgaaattttaatcgcattataaatttcaggcaagtgaccgtcttcaaaacgcacgtcgacgaccggtcctaatacctggctaacgcgtcctttcttcatcgctatccctcctgacaaaatctttctattctaaagcggctgctccgccgacaatttccgtaatttcttgtgtgatggctgcttggcgagcgcggttgtaagaaagcgaaagtgaatcgataagttccttcgcgttgtctgtcgcatttttcatcgccgtcattcttgcagcgtgctcacttgctttactgtcaagaagcgcaccgaagattaagctttctgcatattgaggaagcaaaacctccagaacctcctcttcagatggttcaaattcataagacgccgttctttttccgccgccgctgcccaaatcagataacggcagaagttttttctccgttacttcttgagtaatggcgctgacaaaatggttataaacaaggtgcaattcatcaaacgcaccgtctataaacatttgaatcgtttgacgggcaagatctttaatttctgtaaacgttacttcatccccaagtcctgttaactcggaaatgatcggaatctcccgtttcttaaagaaatcacggcccactcttccgatggcaatcaccgcatactcatccttagactgatgacgttcttgcatggcctgataagcactccgtaaaaccgaactgttaaaagcgccggcaagaccgcggtcagacgtaatgacaaggtatgccgtttttttcacttctctgctgagaagcatcgggtgcttcacgttgccggaaactcttccgacgtttgacacaacctcttggattttatccatatatggcacaaatgattttgcattgttttcagcacgattcagcttagccgcagataccatctgcatggcttttgtaatctgacttgtttttttcgttgacgtgatccttgacttaatatcgcgtaatgaggccaaagatttcaccaccttttctcttcatctgcgtaaaaagagagaaaaagagaacctttttctctcatcagcattcgagttagttgcttggtgcaaatgtgcgtttgaagccttcgattgcagcattgaagtcttcatcagcaggaaggtttcctgttttcgcaattccgtcaagcaggtctttatggttttggtcaaggtacatgtagtactcttcttcaaaacgtctgatatccgccacaggaatatcatcgagatatccttttgtcagcgcataaagaatggctacttgcttttcaaccggaagcggcttgttcagatcctgcttcagcacttcaactgtacgcgcaccgcggttcagttttgcctgagtcgcttggtcgaggtcagaaccgaattgagcgaatgcttccagctcacggtatgacgcaaggtcaagacgcaaagtacctgatacttttttcatcgctttgatttgcgctgagccgccgacacgggatacagacaatccggcattgatcgctggacgtacgcctgagaagaacaaatcagattgcaggaagatctgtccgtcggtgatggaaatgacgttcgtcggaatataagcagagatatctccggcttgtgtttctacgaacggcagagctgtaattgatcctgcgcctttcgcgtcgctaagctttgctgcacgctcaagcagacgggaatgaagatagaatacatccccagggaacgcttcacggcctggcggacggcgaagaagcaaggacagctcacggtaagcggccgcttgtttagaaagatcatcgtatacaacaagaacgtgcttgccgttgtacataaattcttctgccattgtaaccccagcatacggtgccaggtacagaagcggtgccggctgtgaggcagacgccgttacaacaattgtataatcaagcgcgccgtgtttacgcaatgtttctactacgccgcggactgttgattctttttggccgatcgcaacatatacgcagatcatgtcttggtctttttggttcaggatcgcatcgatcgcaacagatgttttacctgtttgacggtcaccgatgatcagctcacgctggccgcggccgattggaatcagtgcatcgatcgctttgataccggtttgaagcggttcatgaacggatttacggtccataacgcctggtgcagggctttcaatcggacgagttttgcttgtaaggatcgggccaagtccgtctaccggttggcctagcgggtttacaatacggccgattaactcttcaccaacaggaacctccatgatgcgacctgttctttttacttcgtctccctcacggatctcactgaaaggtcctaagatgacgatacctacgtttgattcttcaaggttttgagccatacccaaaacaccgtttgaaaattcgacaagttcaccggccatacagttgtcaaggccgtgcacacgtgcaataccgtcaccgacttggatgactgtacctacgtcttgaacttcaatatcagattgataattttgtatttgctgttttatcagcgtgctaatctcttcagctttgatgctcacttaggtttcaccccttctatcgattttccccggctaattgacgttcgatgcgctgaagcttcccgcttacgctgccgtcataaatccggtttccaatgcggactttaatgccgcctattaaatccgtctgcacttcatttctgattctcagtgaagcgactccggctttttttgcaaacacttgtgataatggtaacatttctgcatccgtcagcggtttcactgaatatacgattgcgtcttctgtttgacgggccacatttgcgagtttgataaactcatctgtgagctcagggacaatcgcggcacgatggcggtcaatcaaaagaaaaatcgtattgagtacggactgtgacaaagagccaaatgcattttgaatcagctcttttttcttcgcagccggcaccttcggatggttcaacacatcattaagcgctttttcattttgaaatacttgttttacaacaattagctcttcttctacttgattcagctgagcggactcattggctatatcaaaaagagctgatgcatatcgtttagagacagctgatccactcatcggctttctcctacctctttaagatagtcctggatcaatttctcttgcgcttgttcatccagttctttttcgatcactttcgacgcaatcatgacagaaagagacgctacttgctcacggagagcagaaaccgcctgttccttttccttcacgatttcagttcttgctgcttctttcagacgttcagattctgcacgtgcagcctgaataatctcttctttttgcttctctcccagtttctttgcgttttcgataagagtttgggattcctgtcttgcttcttttaaaagaacgcgctgctcttcaatcagctgctgcgcttctttatttttttcttcagcagacgtaatttctccagcgatgtggtcttcacgctgtttcattatgtttaatagcggccctaaagcgtatttcttcagaagcgctaataagattaacatagctaacagttggaacaggatatctccgccgttaaacgacaatcctagttcaagtggtaattgagacatctactacggcaactcccttctgcaggtttttctttgctgatccagcagccgcacttgtctcttttcagccggcaaggcgggatgcttatcagacataaagcaatggcgaaggttctcttggaatgatcttcgccatttttagttcatataaggcttttatgcttagccaaagaacgctaagaatgcgataacgacagcgataataggaagggcttcaactaatgcgatacccatgaacataagagttctcagttctttacctgcttccggctgacgggcaatcccctctaccgtacgtgaaacaatcaaaccgttaccaatacctgcaccaagtgcgcctaaaccaattgcaatcgcagctgctattaaattcatgaaaaagttcctcctttaaaatgttatccgtttggatataatgttttaatgatcatgactgattttatgagacatgtacaccatcgtcagcattgtaaagataaatgcctggatagcaccaataaataaactgaatgcttgccatgccagcatcggcagaatggcaccgattgtaccgacaagaccgagagccacgctttgcgaataatggcttgttgctaatcccgcaagcaggccgagaagaatctcaccggcgaagatgttaccatacagccgcaaacctagagtcagcgtattcgcaaactcttcgatgattttcatcgggagcatgaatggaacaggtcttaaatagtctttggaatattccttgagccctttcatcttcacaccatagtagtgggttaaagcaacaaccatcacggctagcgttaatgtaatggcaggatcggctgtcggagacttccaccagagctcatgtccgattgtaatagagaacggcagccccagcatattcgacacaaatatgtacatcagcaatgtgacaccaagtgccaagaagttagcccctgtttttaaatccattgtactgccaataatattgcggacgaaatcaacaatccattccataaagttctgggcttttccgggacggatcgaaagcgttcttgtcgtcaatatagcaatcaataaaacaatcacactcgccacagtaatcatcagaatgtttgtcagattaaaagtaagacctagaaattctatagttctgtaaccatgattcaaagggttttcacctctcttccattgatgaacgtttaagctggataaaggaatctatcataatgacagggtatattgtcattaatccaataactgtacttgccatatgaaagtattcgggatttttataggcaacagccacagcaagaatcgcattgcaccaccgcgctgcgctcccgagagatcgtatggactttcctttctcaacagctctgtcaaaagcattcattcttctgacgagcagtaaaaaattaaacaaactgaaaacagttcccagaataaggcctaaaaaaacggttttatacgctgttaaaccataacccagtacatacactgccaaaatgaacaataaatatttgcgttgtctgctaaatgtaagcttgggatcgtccatcaattatctgtctcctgatgaaaaaataatgtatagcttggatacggcaaaaatcagcggttaacccttagtagaagaccttttttgaccggcaaaacgggcctgttcgaaaaaatcattcatccgcaagccttgcagggatgctgtttcattcgcttaaataaatcctcataatacgggtttgctgagaggatttacattgaggatgaggactataatgaaagctatgaaaaccttctcataataccctcgtttagcatacaatagcccctaacatgtgtcaatctgtttaaagttaaaaaactttttatactttacgtctccacagaatgttcacattttcacctataattgtatacagattcaccgaatagcaaaaaactggataaaaaaatgaaacccccttttggggatttcattttttattttgttccaaacatgcgatcacccgcatctccgagacctggaacaatatatcctttttcatttaatttttcatctagcgccgcaatgtaaatatcaacgtccgaatgatgcttctgcaattcttccacaccctccggcgctgctacaagacacatgaaacggatatttttcgcaccgcgttttttaaggctgtgaatggcttcaactgcggaaccgcctgtagcgagcatcgggtcaaccacgatgaattcacgctcttccacatcagaaggaagcttgacatagtattccacgggttttaaggtttctggatcacggtaaaggccgacatgtcccacttttgccgcaggaatcagctttaaaatgccgtcaaccattcccaatcctgctctgaggataggaaccactccgagttttttccctgagatgactttcgatttcgcagcctgaaccggtgtattgatatccacttcttccagaggaagatcgcgggtaatttcaaatgccatgagtgtagccacttcatctactaactctctaaaatccttcgtacctgtattttcattccgtatatatgtcagcttgtgctgaattaaaggatgatcaaatacataaacctttcccatactgtgtttcagctccttttttattgtcccatcaacaattacacacttctattgattctacaaaaaaagacattgagtttcaagaacatcgtcaaaaaacccgccgggcataagccccagcgggttttaggatcttaataatctaattctttatataaaggaaatttatcagtcagagcagctacacgctgtcttgcttcttcaagttttccttcgtcttcgtggtttttcaatgcaagcgcaatgatagcaccgacttcttctaatgcgtctccgtcaaaaccacggctggttacagcagctgtcccaagacggatgccgcttgttacgaaaggtttttcaggatcatatggaatcgcgtttttgttagacgtaataccgatttcatcaagtacatgctccgcaaccttaccagtcagtccgagcgaacgaagatcaacaaggataaggtggttgtctgttccgcctgaaacgagctggatgccctctttcgttaaggcttcagccagacgtttcgcgtttgaaatgacgttttgtgcatatgttttgaaatcgtcctgcaatacttcaccgaatgaaacagcttttgcggcaataacgtgcatcagagggccgccttgaattccagggaagatcgatttatcaattttcttgccaaactcttcacggcaaaggatcataccgcctcgaggaccgcgaagtgttttatgtgttgttgttgtaacgaaatcagcgtaaggaaccgggtttggatgaaggcctgccgcaacaagtcctgcgatatgtgccatatccaccatgaagtaagcgccgacttcatcagcaatttcacggaatttcttaaagtcgattgtacgaggatacgcacttgctcctgctacgataagcttcggtttatgagcgagggctttttcacgcacgtcatcgtaatcaatatattgagtttctttatctacgccgtactcaacaaagttatattgaacaccgctgaagttgactgggcttccgtgtgttaaatggccgccgtgggagaggttcatcccaagtacagtatcgccttgctccaaaatcgtgaagtacactgccatgtttgcttgtgcgcctgaatgaggctgaacgtttacatgctccgctccaaagatttccttcgcgcggtcacgggcgatatcttcaacgacatcgacgtgctcgcatccgccgtagtagcgtttgcccggatatccttctgcgtacttatttgtcaaaacagatccttgtgcttccataactgcttcacttacaaagttctcagaagcaatcaattcgatcttagtctgttggcgttcacgctcatttttaatggcgttaaacacttgttcgtcttgcgcaggtaaatgtttcatcagcgagatcctctcctatccgtatcctgttctttgtttttaccatcactattgtacatggtttttaaggccgatgtaaaagattatttttaaaaaatctaaatttttattggtaaaaacgaatattaataacttaaatttaatttaaagttcggaatttatttcactgtcttaaaataaaagaaaagactggctatgcagtcctttcattcacactcataaaccgcccgcactccgccgattagtttcggccgtgtacgcgccaatgtcacatgagctgaaccgaggctgttttgagagacacgcatagggacagccaccggcttcagatgcatgccgataaacgtatcgcctatatcaattccggcgtcagcctgaatggtttcaacaagaacaggagacttcatctgcttaaacgcataagacgccatcgctccgcccgcttttggaacgggcacggcagaaacggttggaagcctgaacagcttggctgtttctgcttcgacgacaagcgctctgtttaaatgctcgcagcattgaaacgccagatggattcccgttttttcccggagctcagcaagtccgctgtagatgctttcagcgatatctacactgcccgatgtgccgatccggctgccggccacttcgctcgtgctgcatccaaggacgaagagctgatcttgtttcaattccgcttggtcctgaaactcagacagcatcgtcttccacgtttgtttcaactcattcattaaacagcacccctacaggtttttctcttcataatcggagatttttccaatacgcgtttggtgtcttcccccggtaaactcagtagtcagccagatttttgcgatttcccgagccaaaccaggtccgatcacccgttcacccatcgcaaggatgtttgtgtcattatgctccctcgtcgccttcgcgctgaaggtatcgtgcgccagcgcgcagcgaatcccttttactttattagcggaaatgctcatgccgatgcctgtcccgcaaattaaaatgcctctgtcaacttcgccgctaaccactttttcggccaccggaaaagcataatccggataatcgacagagccgctgccgcagtcacagcccatatcaatatattcaatttgcaattcgtccattaactctttgatttcatttcgaatgtgaacgccgccatgatccgatgcaatggctactttcatctgcttttcctcccagcgtgtgtgatgcggcccgcccgctttattgaccgcgcagcctgtccgctctttgattcacaccatatgatgtgcttttcactatattctactccttcacgcaggatttgcaaatgacctgtttgcagattttctgacaacttatctacggtcttttttcagctgttttgccagctgccgaagaagctcttcaagctcatctcgcgtttgtttatagatgtcaattgagccgccgaacggatcgaggacatcaccatggctgcctgtgacatattcttttaacgtaaacactttatcacgataacgtccaaattggctggcaatgatctgtttgtgctgatgggtcatagccagaaccaaatcagccgattccataagttcttcagttaatggagaagacacatgattaagggcaatgtgtttttcaaacaacgcttcgactgcatgaggcgtcgctttcccattaggtgaagcaaacacacctgccgagcggacattgacattcagcccttccatttctgcaattgatttaaaaagcgcctcagccattgggctgcggcacgtatttccagtacagacaaaaataatatccatgtcagtcaccccttatttttctctattatatatgaagaaaaaagaaacggcgacttcgtttcttttattggtatattaaattggcaaaagcagctttaatccaaacacgattaatatgatgcccccgagcgcttcgctgtatgtgccaagccatgactgcacttgttttccgaccagcaggcccagccatgtcaacatcatgctgaacagcccgaacagggtaattgtgaggagcggatgcgagccgtatatccccaagctcaagccgacggaaaagctgtcaaggctgacgccgatggcaaacagcaataagcccggccctgccggtgacatgaatcgttcttctgactgtttaaaagaggccataagcatttgaaccccaagaacaaaaagcagcgccccaccgatataaaccgctaacacgccgaggagccctgacagcatgttaccggccgccatccctgcgagaggcatgatgacgtgaaagaggccgatgatgaaaccaatatagaatatctgcttctttctaagtttgaccatgcccattccaaggccgacagaaaaagcatccatccctaaagcaaacgccatgatgcttaatgtaatcagttcgcctataaacaaatccgacatacataaataacccccttggacacgccccgcttttttagcctatgcgtgtccaaaaagggttagaacatctgactgctttcagcgaatcactcttcctccggcggctttcatcagcctgttcataatagcaagaccgacacctgtatccggaaaggattccgctataatgaaatccaccttattctcatcaaagctgcgcaaagcatcatacagccctgccgcaacagtctcaagctgagcccgtcttccgcagctcttcacataatcagcggaataaacgcccgcgttttcttctgtcgtcaggacaccgacccgtcttccgccctgttgatattcttgaatgaggtgctgaatgcgctctgggctgccttcgcaaatggcaagaggcgctgtcggcgcataatgtgtatatttcatccctggagaaatcggcttctcgttttgatcgctgagccctttatccacatggatcggcccgatcacggcctcaatttgttccttcgtaatgccgcccggacgcaggagaacagggatgtcgtccgcacatgaaagcacagttgattcgaccccgattccggtagggcctccatccataataccggctatgcggccatccaagtcgtgagccacatgctccgcttttgtgggacttggcttgcctgatagattggcgctcggtgctgcaatcggcagtcccgattcgcgaatcaatgcaagggcaagcggatgatccggcattctaatggcaaccgtttcaagacctgccgttacacgaggtgaaagcgcatcaggtttgcaaggcagaatgagcgtaagtgctcccggccaaaaccgtttcatcaatgttttcgccttttccggcgccgggcccgttaaatcctcaagctggctgatatccgcaatgtggacaatcaggggattatcgctcggccgccctttcgcctcatatatttttttgacagcatccgtattttttgcgtttgcgcctaggccatatactgtttctgtcggaaaggcaacgacctcattttctcggagcaaagcggctgcttgtgcaatttgtggatcatttgtggataactcgtcagttacatccacaaaccatcttttcgttttcatttctgaccaaactccttattcacaacaataaaacgattgttttacgcgtgtaatccttttgaaagtataaaagatgtcctgtaataaaacaagcgttatccacaaattgtggacaacgctaataaagaagtggataagtatgtgtataaactgcacttatccagacgcttttttcatcaaaacggccccttctgtttgccgcgattcacagaagtgatcagaagaaaacagctcctccggtacactttcagctctttcaaaacccatggccgtcagaaagtccgcagaggaatgctgattcgctactaggtacacggttttgatctgatgcttttcgcacagcacctccatgctttgaaaaagcgtgacgatgtggccttggtgaagcttgtccgatatgacaagtgatcgcagcagcccctggtcacagctgattttttcaataccgaggcatccggcaatgtttttctcactgtcctccagcataagaaattgagtgaagccttctttcacgccttcatagctggttttcgcctgttttaaaaattcctcgagcacatctccgtctttttcccttgccacccgcagttgataaaacatccgttcaccccgtttttgcgttctttcttccaatctatgaggcaaatctatttttagaccagatgattaggaaaaaaggtcggaaatccattcgactaaaaagaatttcacttctgtgccgtcttctttttcttcattctcttcttttttggctttttccgctttagcggttacgtcctcaagcactttttcagtctgcttttttgaggcttctttatcttcttgttctttgacggcttccccgttagaaaaatcgagaaagcagaggggcgggaacagcacacaccaccagttggcgccgtctccgtttccaagcgtaatcaaaatcgcttcatactcaccggcaggatataccatgttgccgtaaagctttgtcggaaacgagattttgtcaaaatcaacggatatcgactgattcgctccttctttctccattgtttcctttgcaattgctttgatttcaggcagctttgaacgaatcacgcgacgcgcttcttcaatagaagtaatatcctttacccaagttgtgatttctttattcaccgcgtctcttatatgacgttttaattgctggtcttgatcactatcgctgtttgccaatattctcaaacgaatcgcctgatccggtatgaccaccggctgattttccgatttctgtgccgtctcttcttttgccagccctacgagcgctccagataataaaagaaagatatatatacaaatgattactgtttttttcatcggtccccaccgttcctctccgtgctttgtttctagccctattatggacaaggagagccgggggtaaacgtgcagggtgaaaaaaatctagcaagctgttaatcttatttatggtacgatagtgttttaggaggtttaagatgaaatacaattatacagtgctgttatcagcattcacgatgtccgttctttattcagtaatttatattcattcatttatcattgccgctctcatcacaatggcattttattttctgtttccttatttgatcttcgcactgccgcttcaaatcatgatgaataaaaagccgaaacggttcagccctttgtatctgctgtattaccttatcgctgcttttattgccaacgcgatcattttcggcgtgcttcagccttcgggacaatctttgtttcaaaatacagccttttatcttttcgctgtattaacagctcttatctattggatatgggattctgttttactgcaaaaaaaggaagcctaagaggcttccttttttattaaaacaaaatcgtcagcaaataacatagaatggaaggtatcgccgcaacaaagaaagcggccgccattttcatgcgagatgtacggccttctttggtttcagaatggtagtttgcccgctgatcgcttccgcttacagccaaacccgatgtaatgatcgcgagccccactaaaacgagagacgcaacgccaaaaatcgcttcatatgaaagagcctgcggaaaaatggtgccaatcatgctctcaatcgcaatgagcaggattcctgctgtcagggcctttttcatgtttacatcccctttgctggtgttaaacagcttgatccattcactcgccagcaagctgcttatttatttttatgaatcagagcgcatatggttctgtcttttccattaatatctttcagcacttccacttccgcccccttaaacgccttgaggatcaggtctttgaccgccgctccctgtttccagccgatttcaaaaacgacaaatactttatccttcataacaagcggaatgtcttccataaaccgcttataaaatttcagcccgtctccgccatcggtgagtgcgtgcagcggctcatgaaaacggacaatttccgataaatcagccatttcttcctctgaaatatatggcgggtttgagacaatgatatccgctttttttcccgccttaataaaaggctcaagcagatcgccctgataaaagcgcacattcgctccgagtttttctgcattggcagaggcgacttgcagcgcctctttcgaaatatcgaccgccgacacagaaaagctttggttttcaagcgcaagcgtgacggctattgcgccgctccctgtaccaacgtcaacaacttcaagcttgccgtcttcagaaaagacactccgatatttttcaagcaaatgaaagacaacttcttcagtttccggccgcgggatcagcacatcatcattcaccataaattcccgtccataaaaaaactcttttcctataatgtattgaaccggcacgccctctttatgcatctcaacgtgacgcttaaagcgatacagttcgtcttcaccaatcggttcctgtaagcttgcgagcagtttgcttctctccattccggtatcataaagcaataggagctcggcagcattttcttctcttcccgcttcggttaaataagaagaagcccatttcagggcttcgaatatcgtcttcatcttaaccttccgactgctgaagcttgcttgcctgatcttcaacaatcagcgcttcaaccacttcgtcaagttttccttcaagaatctgatcaagcttttgaatcgtcaaaccgattctgtgatccgtcacacggttttgcgggaagttgtatgtgcggatacgttcagagcggtcaccagatccgactgctgatttccgtgtttgatcatattcagcctgggcttcctgctgaaatttatcatagattctggcacggagaaccttcattgctttttctttgttcttaatttgagatttttcatcctggcatgatacaactacacctgtcggcaagtgagtcagacgaaccgcagacattgttgtgttaacgctttgtccgcccggtccgcttgaagcaaacgtatcgacacggatatccttctcatggatgtcaacctctacctcttctgcctcaggaagacatgctactgttgcagtggatgtatggatgcgtccgcctgattctgtttccggaacacgctgtacgcggtgggcgccgttttcatatttgagtttagaatacgcgccgcttcccgtaatcataaagatgatctctttgtagccgcccgttccggttacattcgcttccatgacctctgttttccagccctgaagctcagcataacgggaatacattctgtacaggttgcccgcgaataaagcggcttcctcgcctcccgcagccccgcggatctccataataacgtttttgtcgtcattaggatctttcgggatcaggagcaccttcaggcgttctgacagtgtttccgtttccttctgaagttcagaaatctcttccttcaccatgtcgcgcatctcagcatccagcttctcttcaagcatcgcttttgcatcagccagctgttctgacgcatctctgtattgtctatatacgtcaactgtttcttgtatatcagattgctcttttgaatattctcttagctttttcggatcgttgactacttctggatcgctcaaaagctcatttaatttctcgtatcgttcttcaattgattttaaacggtctaacacggtcttcacctctgttttcctgtgcgtaacattctcattatagtatagtgattaaccccagtcaaaagcatttcaatcccagctttaaaagcctcctctgctatactgggaatcgaggagggatattgttgctgaaatccatacatcatattgcaatcatatgttcagattacgaaaagtcgaaagctttctacgtacataagcttggttttcaggtgattcaagaaacgtaccgcgaagagcgcagctcctataagcttgatttgtcgcttaacggctcgtatgtcattgagctgttctcgtttcccgatccgcccgaacgacaaacccggcctgaagccgcaggcctgcgccacctcgcctttacagtcggtagcttggataaagcggttcaggagcttcatgaaaaaggaatcgaaacagagccaatcagaacagacccgctgaccggcaaacgtttcaccttcttttttgatcctgaccagcttccattagaactgtatgaacaataacagtttttgaagaaaaaaaggagatacccactttctttgccgaatcttttcttgttttgtctaacgggaagggaacctcattctatggtcgaatacctagcttaaaaggaggtatgggatcatgaatacaaatatggtagcaagtgaactcggcgtctccgcaaaaacggtgcagcggtgggtgaagcagctgaatctaccggccgaacgcaatgagctcggacactattcgttcacggcagaagacgtgaaggttctaaaatccgttcaaaaacaaatctctgaaggcacggcgattcaggatattcatctgccgaaaagcgctaaaaagcgcacaggcttccttgtccaaaaaacaaatagcgacacagaacgaagaatcgagcagcttgaacaaaagctggacacccttttacagcaaaggcaggacgaaagtgaattgatggcaagaatgtcggaactggaacgccagctgaaacaaaaagccgatgaaggtgtatcttaccagctgcttcagcaccgcagagaaatcgatgatattcttgcagatctgcaatcactgacctcacaaatgaaagaattcaccgctcagccgatccccgagactgctgctgcttctgaaaaaaccaaaacaagaaaaaaaccgctgctgtcactgttcaaatttcaaacctaaagcaaaaagctccccgtaaagggagctttttttgttacgcagtaagcgcgataatgattggaagtgaaatcaatgacagaatcgcactgaccacaaacgcagttgcagtttcttcttcttgtttctcgaaacgagtcgcaatcatggctgcaacggcagaaccagggaatgcaacaagaaggattgcttttgttgtttggtcagccggaagtccgatagcaagagcaatcaggaacattaatgcaggctgaaccgcaacttttagtaacgcaataccgatagccggcatactgagtttaattttacgaataccaacggtaacaccgacagcaaagagagcaacaccagatgttgtgcttccaagctgatcaagcattttaacacccagctcaggaagagtgaaattgaaaaccagcaccaagatcatactgattaacggagcagctgcaagcggctcacaaagaccatgcaggattgattttcctgtcatcttccagaagctgtcgccactctcttcgtttttcttagaagactcaccaacagtagcgataatgatcgcgagcggatcaagaatcgcgttaaccacgatacctgtgaccgcgatcggaatcgcaacttcattcgctccgaataagcttcccaataccgggatacccataaatgcgaatgtcggctgtgcagagttcaaagaaaatacagatgagttcgttaaatcatacttgaaaataaatctgcaaaccaaaagaatgatgatatagaaaccaacaatcccaataattaaagaaatcattaaaggtacttgtgataaaaattcacttctggaagttgtcaaaataccagcgataaagtgagctggaagtgcgtatttcgttactaacgtacttaccccttttgccgacttggcatcataacttccaaaatgtcctgcaaaccaccccagcacgataacaaagaagatcggcgccaggaggattaagatatctaagatgctcaaaatattctcctccaaatcctatgtccgtatactttagctttacaaaaagctttccctcggacagaaaaatttactcgctaattatttcgcgatgacttttttgtattcaggtgtccacattgcttcaagtaccgcttgtttcacatcttcaggctgacgatttgccacgccgtctttaattgctgcttcagcaacggcaatcgcaacttggatagaaacctcttgaagcttatcaatgcttggaagcaatcctgctccaggtgtttcaagatcaaccatttcagcaatcgcatcagcagttgctgcaaacatagcaggtgtaatgatacgcgcttcagctacaattgaaccaagtccaagaccagggaacgcgaatgcgttgttagattgtccgatttcataagaaacaccgttgtattctacattgtcaaatgggcttcctgttgcaataagcacttttccgtcagtccatttgaacagatcttcaggaacagcttcagcaaggtgagtcgggttagacatcggcatgataaccggacggtctacgtgagatgccatttcttttacaatttcctctgtgaatgcacctgaaacccctgaagtaccaatcaagattgttggtttcgcttgacgaacgacttcatcgaatggaatttgacctttttcatcgcgcttccagtctttcacttcatccgcattgcgaaggtaaggtttttggaaatcaaggatgccttcgatgtcttcagtcagcaagcctctgtaatcaagtgtgtagaaacgtttgttagcttcttcttcagataatccggctagcaccattgtgtcacggatttggtcagcaataccgataccagcagaaccagcaccgaagataacaacacgctgatctttaatagaagcgccggttttcttcatagcggcaagcacacctgcaagtgtaatcgcgccagtaccttgaatatcatcattaaatgtcaggatttcatgattgtattttttcatgatgttgcgtgcatttttgttgccaaggtcttcccagtgaagaagcgctttagggaagaatttcaatgcagcttttacataagcgtcaatgaaagcttcgtagcgttcaccttgaacacgttcatgcttgttaccaatatataaaggatcgtttagaagtttttcgttgttcgtaccgacatcaagcacaaccgggataacacggctagggtcaataccagctgcagcagtgtaaacagctaatttaccgattgcgatattaataccgcctacaccccagtcaccgataccgagaatgctttcagagtcagtagcaacgataagatcaatatcgcctgctgtcgcgtgaaggttttcaaacgctttttcaataccgtcaatgttgtcgattgacaagtagattccttgaggtcttctatattcatggctgtactcctgaatcgcttcaccaactgttggtgtgtacacaacaggaagcatttcgcgaagatggtttttcagcaatttatagaaaagaacttcgttacggtttgcaagatcacttaagtaaacattttgacgaaggcggtcaggctgcgcttggaattgctcgtacgcgcgttgtgcttgttgatcaagagaaagtacagttggcggcagaagcccttctaagccgagttcttgtctttcttctagtgaaaaagcaacgcctttatttaaagtaggaatagataaaacttcttttcctctaagagttgtttctaagtggccttctttcgttttttttatgttattcaagcaaatctccttctttcttgaaatagttaaccaagttaagtaataacccatctaaaatatgaccgatcatgatctttatgcgactttgtgacaattattcgaacaatgtctcaaaactatttacattacgtaagctattgtatgcctgtcaaaatcaaaattcaagggaagaaaattacttaattttttaatatacttatttaaattttttaattgcatattatcagaatataaaaaaaacaccggtgtttttagccggtgcattctatctttatacccatgttttggactattttttagatttacctgggacttcgtgatgatgtctgcatcttgcttcatatgattcagatgcaccaaccaaaatgaccggatcatcgtaagaagcaggtttgccgtcaatgaggcgctgtgttctgctcgccggtgatccgcaaacagaacagacggcttgcagctttgtcacactttccgcaatcgccatgatattcgggacgacaccgaacggctctcccctaaaatccatatcaaggcctgctgctatcacacggtagcctttatcggcaagagatgataaaacctcaacaatttcctgatcaaaaaactgcacttcatcaaccgcaatcacatctgtactttcactgatgtgatcccaaatgtccgcagcagacgaaatggcatagctcgtcatcgatgttccattatgggagacaacagcagcttcgctgtatcggttatcaattacaggcttaaataccctgacttcctgcttggcataagttgctctcttcactcttctgatcagctcttcagatttccccgagaacatgctgccgcaaatcagctcaagccacccgctttgtttcattatgtacataggcttcgctcccctctctctgccagctgtgttttagacaatataaaaaacaggcaagactgctgcttgcctgttgagaaatctattattacttaagaccgtattttttgttaaagcgatcaacacgaccatcagcagaagcgaatttttgacggccagtgtagaatgggtggcattcagagcaaatctcaacgcgtacctcttcttttactgagcctgtttcaaattcatttccgcaagcgcatttaactgttgcttttttgaaattaggatgaattcctgctttcattgtatccatctccttccgccctgaatcccgtgtggaaacagagttattatttcggagcattgtccgaaacgcatatgagaaaattatatcagtgatttacttcttttgcaaatacaatttaccttcttgcagatgatagatttgcctgtttccattcttgattgagaatatcgaaaaattcctggtttgttttggtttttttcatttttctcatgaacttttctgcgaaatcaggtgaatcagacatcgttttgcggatagaccataaacgatcaagatgctctttaggcacaagcagctcttctttgcgcgttcctgaacggcggatatcgatagcagggaagatgcggcgctcggcaagagagcggtcaaggtgaagctccatgttgcctgttcccttgaattcttcataaatgacatcatccatacgtgaacctgtatcgaccagagccgtagcaaggatggttaagctgccgccctcttcgatatttctcgcagccccaaagaagcgtttcggacggtggaacgccgctgggtcaatccccccggaaagcgttcttccacttggcggaatcactaagttgtaggcgcgggcaagacgtgtgatgctgtccatcaggataatgacgtcttttttgtgttccacgagacgcatcgcacgttcaagcacaagctcggccactttgatatggttttccggcacttcatcaaacgttgagctgacgacatccccagctacagagcgctcgatatcggttacttcctcaggtctttcgtcaattaaaagcacgatcagctctgcttcaggctggttcgctgtaatgctgttggcaatttccttcagcaacatcgtttttccggctttcggcggcgcaacaatcaatccgcgctgcccaaatccaaccggcgccatcatgtccataattcttgtagacaagaagttcggctttgtttcaagcaccatttgacgatccggataaagtggcgtaagagccgggaaatgcacacgctcttttgcagattcgggatcatccccatttactgcttcaacgtgcaaaagtccatagtaacgctcattttcttttggcgggcgaaccttgccagatactttgtctccgttccgcaaatcgaaacggcggatttgtgaagctgagatgtaaatgtcttctgagcttggagagtagttgatcggtctcaggaatccgaaaccttcagactggatgatctcgagaacgccttccataaacagcagatcttcctgttctgcattcgctttcagaatggcgaaaatgagttctttttttgtcagtttgctgtaataggagattttataatgtcttgcaagttcataaagctctttcaatttcatattttccaaagaggaaatagatacgtctttcataaaaacaccacgcttttcatagtcaatatcttactctgaacatgtcatctgctgcttttgcacaacatccgccaaagcacattctttttttaacataaaggaacttctatcggtaacacttccacccatgatcggcgcttttgttaaaaggattgtcttaatgagttttgaaggaagcgaggacaaaaacatgagaagatcaatacttatatcgtctgtatgcggtagaaattgaaactttcctagtgcttaaaagaaggtattacgcagtaaaattcgcagcactctttatttttaccttatttcaaaaaattattcaactgaaataaggttttgacacggaattgatagagttgacgcttttctgcaaaagttaaagcgggctcacacccgctttttctgtttgttatggacggattacaagatttggtttctttttcaagctgtgtctgccgtcaacgaaacgaacagtgcccgattttgcacggataactaagctttcagttgtaccgacagagcctttgaattgaactccttttaacagctcgccgtcagtaacccctgtagctgcaaaaatcgcgtcatcacccttcacaaggtcttccatgcgaaggactttgcttaaatcaaggcccattttgtgacagcgagtgatttcttcttcgctttgcggaagaagtttaccaatgatttctccgccgagtgctttcagcgcaacagctgaaagcacaccctcaggagcgccgcctgatccgaacaggatatcaacgcccgtgtggtcgaaagccgtgttgatggcgcctgcgacatcgccgtcattgatcaatttgattctggcgccggcctcacgaagctcggaaatgattttttcgtgtctttcacggtttaaaattgtggcaacgacgtcctcaacgtccttgtttttcgcttttgccaccgctttaaggttgtcaatgacaggtgcttcgatgtcaatgcagcccaccgcttccggaccgactgcgattttttgcatatacatgtcaggagcattcagcagagtgccgtggtctgcgaccgcgatcaccgtcagcgcgttccagccgccgcttgctaagatgtttgtgccttcaagagggtcaactgcgacatccacgcgagggccgtacccgtttccgagtttttccccgatatacagcatcggcgcttcgtccatttccccttcaccgattacaacggtccctttcatcggcactgtatcaaaaacgtctctcattgcacttgttgccgcttcatcagcctcatcttttttcccccggcccatccatcttgctgatgccaatgccgcagcttcggtcacacgtaccaattccattgataaacttctttccatttcaacacgatctcctctcacaagaaaccattatgaattttgaagctgttctatttcttcgtcagtcattctttcccgccaaattgtcgctccaagcccctcaagcttcttctcaaggctgctgtatccgcggtcaatatgctccagtcccgtaatttccgtgacgccatcagccatcagtccggctaccaccaagcaggctccggcacgcagatcactcgccttcacttttgcgccttgaagctcaacaggacctgtgatgatggcagatctgccttctactttcatattggcacccattcgtctcagctcatcaatgtgcttgaatcttgccgagtagatggtgtctgtgacgacactcgtccctttcgcccttgtcaggagcgccgtcatcggctgctgtaaatcagtcggaaaccccgggtatacgagggttttgacgtcaaccggctttaagttcttctgcccgccgacaatgaggagctggtcgtcgcttgtttcgatatgatagcccatttctctcaactttgccgttaacgactctagatgagtgggaatgacgttatcgataatgacttccttgcccattgcagcccctgcaatcataaatgtcccggcttcaattctgtccggaatgatcgtatgcttgcagccgtgcagttccttcacgccgtcgattcgaatcacattggtgcccgcacctttgattttggcgcccatgctggtaagcaatgtcgcgacgtcaatgatctcaggctccttggcagcgttttcgatgatcgttttcccttctgccaaaacagcggcgagcataatgttaatcgttgccccaacgcttacgacatctaaataaatccgtgcgcctctcagcctttcagctcgcaaataaatggcgccttgttcattggttacttcagctccgagtgcttcaaagcctttgatatgctgatcaatcggacggggccctaagtgacagccgccaggcaatccaatgaccgcctgcttgaagcggccgagcatcgcccccattaaataatatgacgcgcgaagcttttttactttcccgttaggaagcggcatgctgatcatcgacgtagggtcaacaaccatttccccattctcaaaatgcacgtggccgccgatttcctttaacaggtcacgcagcgtttcaatatctgaaatctctggaagcccttcaattgtcacctcggaatttgccaaaatggttgcaggtattaacgcaacagcgctgtttttagcgccgctgatatgtactgtaccgtttaacgagtcaccgccggcaatattcaacttttccatgatagtctccttccataagaagatagctgcggagctaaataaaatgtcattttattctgtctctgcaaataaagctcatgtccaaaatctagccaattcgaagagaaagaatacaacacattgtaaaatatcaggaagaaaatagcgaagctttggggggtacaggtttcaaaagatgcacagagacccgccggctcgagagacatcgtcgtcatccggcaaaagcagtacgcatacccttcattccgatatcagcttctgcagcccaatgattccttctctgtaaagcggcgtcagcatctgaagatccgctgtatcaggtcggtgaaatacaaaggccgcggcaaacaggcataaagctgtttgccgcccctttcattatttgttccagtctgccaggaattgttcgattcctttgtctgttaacgggtgtttagtgagcgcatgaatgactttcagcggcattgtgccgatatgagcccctctaagagcagcttctgtcacgtgctgcggatggcggattgacgctgcaatgatttgcgtgtcaaggccgtgaatgtcaaaaatctgtttaacttctgaaatcaggtcaagcccgttgtggccgatgtcatctaaacgtcccaggaatggagatacatatgttgcccccgctctggcagcaagaagcgcctggttggcattgaagatcaatgtaacgtttgttttgatgcctaagtcagtaagtgctcttaccgcttttaaaccgtcagacgtcatcgggattttcaccgtaatgttcggagcgatcttcgccagttcttttccttcctcgatcatttcctcagctttcaaagaaataacctctgcgcttacagaccctttcacgacgtctgtgatctcgcgaagacggtcgtggaatgatacgttagcttcctttgctactaaactaggattcgtcgttacaccggcgagaattcctaattcattcgcttctctaatttcatcgatattggctgtatcaacaaagaataacattttcaaaaagcctccctgattaagaaattttctgaactgtgaatatgattgcgctttctaaagatagacggaaaaccgcctgtcaagctgtcaggcggctataaaaagttccaattgaattaagcttggtttgaagaaccaaattcacgcattttaccgataactgtttctttgatcgcttcacgagctggtccaaggtatttacgtggatcgtactcgtcaggcttagctgccaatgtttcgcgaacagcttttgcagaagaaatttggttttcagtattcacgttgattttagctgtaccaagtgaaattgattttttgatgtcagcagtcggaattccagtaccgccgtgaagaactagcggaagaccagttgattttccgatctcttccatttctttgaagccaaggtttggctcacctttgtaagggccgtgaacagaacctaatgcaggtgcaaggcagtcgatgccagtgcgctcaacaagctcttggcactctttaggatcagcgtagattacgccttcagcgataacgtcatcttcttgtccgcctactgttccaagctcagcttctacagatactccgtggaaatgagcaagctcaacaactttagcagttgttgctacgttttcttcaaatggatggtgagaagcgtcgatcattacagatgtgaaacctgcatgaatcgctttcgcacaagattcaaagcttgaaccatggtctaagtgaatcgcaacaggaactgtcactttgtactcttccataagtgcttttaccatagcaacgactgttttgaagccgcccatgtagcgtcccgcaccttcggaaacaccaaggatcactggagatttttcttcttcagctgcttgtaaaatcgcttgagtaaactcaaggttgtttaagttaaattgtcctacagcgtaccctttttctttagctgtattcaacatttccgtcatagaaactaaaggcatgtcgaatgtcctccttatgtagcctgattgtcttctagcgaaaaaagctttccaccctagcatgacccatatattgctgtcatatgtaaatactcagatcgctttttctccataactaggataccaacttttcgacaaatcggcaacataatgacatgattcatttgtttcttctttttgtcagttagacttcaggggcagatattttttgacggcgtctctgatttcgtcgatgtcaaacggcttggcgaagtgcgtcagagcgcccaattccttcgattcctggatcatgtcgagctctccgtatgccgtcatgataatgacccggatgttttcgtcaatgaccttcatccgttttaagatttcgattccgtccatgccgggaattttcatgtccaaaagcacaaggtcgggccgttcttttgtcacaatgtcaagcgcctgcaggccgttcgcagcctgaaacgtctggtagccttctttattgaacacttcatttagcaaaatacgaatgccgtattgatcatcaacgattaaaattttttcattcatcattttacaccccaatattatgattttcgtcaaaagtaagcagtattgtatgtattctgtttgattttcctatttcctttaattataatagtctactttacgacattttctgagcattttctcttttgttgtatactgatattgtacgttataaaggaggattcacttatgttgaaaatattcacgacgcagttaacaggtattttttcccgcattcaggataaggaatctgacgcgattgaagatggggcgcggctgcttgctcaagcggtgatcagcgggcattccatttatttatacggagcaaatgagctgcagggcgtcttttttgaggccactgaaagcaaagaacccttcccatctgtcaaagcctttccagaaagcgctgaggaagtgacagaaagcgacagggtgctgatgttttgctcagggacgggcacagccgaagaacaggcgctctcaaaagagctttatgaaaaaggtgcgggagtcgtatgcgtatcgcccgcagccaaagacagtgcgggaatagaacagtattgtgatgtgcatattgattctaaactaaaaatgccgcttgttccggatgaagacggcacccgttacgggtttccctctttaatgacagcactgtatgtctatcacgctttatcgtttacactaaaagaaattctgcaagagtatgcataatatcttattgtacatgctggaacttgccggaaacaaataaaaaagacttgcccgcttttgacaaacggcaagtcttttttattacttctgatttgcagcttcgacagacgctccgataaagcctttgaatagaggctgaggtcttgtcggtcttgacttgaactctgggtggaactgagaagccacgaaccaagggtggtctttcagctcgatgatttcaacaaggcgtccatcagggcttgtgcctgagaatacaaagccttgctcttccatttgctgtctgaattcattgttaaactcatagcggtggcggtggcgctcgtacaccacttcatcctgatacacttcaaaggctttcgtgccttcttcaagcttacaagggtaaaggccgagacgaagcgttcccccgagatcctccacatccttttgttcaggaagaagatcaatgatcgggtattgagttgacggatcaatttccgctgagtgggcgccttttaagcccaatacgtttcgtgcgtattcaatagacgccacctgcatgcccaagcaaatgcccaagaacggaatgttgttttcgcgcgcgtattttgtcgcgacgattttaccttcaacaccgcggtctccgaatccgcccggcacaatgatgccgtctgttccgcttgtgagttctgcgatattgttttctgtcacttcttccgcgttgatccatttcacttttacatctgcgtcaaacgcatagcccgcatggcggagagactcgacaacagaaatgtatgcgtcaggaagctcaacgtatttgccgacaaggccgattgtaatcgtttgagacaggttgctgactttgttaacaagctctttccattcggacatttccgcttctttgcatgccaatttcatgtgctcgcaaacaagcttatcaagcccttgtttttgaagctccagcggaatggagtaaaggttgtccgcatcttcacattcaataaccgcttttgtatcgatgtcgcagaatagcgcgattttatctttcatatcttgagaaatcggcatttctgtacgaacgacgatgatgtttggctgaatgcccaagctgcgcaattcttttacgctgtgctgtgtcggttttgtttttaattcgccagcagctttaatgtaaggtacgagcgtacagtggatgtacattacgttttcacggccgatgtcgctcttcatttggcggatcgcttcaaggaatggcagtgattcgatgtctccgacagtaccgccgatttctgtaatgacaacatctgcgtttgtctctttccctgcgcggtaaacacggtctttcaattcgtttgtgatgtgcggaatgacctgtacggttccgccaaggtaatctccgcggcgttcttttttaagaactgttgaatagattttacctgttgtcacgttgctgaatttattcaggttaatgtcgataaaacgctcatagtgaccaaggtccaagtctgtttcagcgccgtcatccgttacgaatacttcaccgtgctggtacgggctcattgttcccgggtcaacgttgatgtatggatcgaatttttgaatcgtcacgttcagtccgcggtttttcagcaaacgccctaatgaagctgctacaataccctttccaagtgaggatacaactcccccggttacaaaaatatatttcgtcatttcgtttgctcctctcttcgctcttagctacatttttaaaatgtactattttataaaaaatcatttagccttttaaatgatttataagaaaaatgaggggtgaaaataagaaagctccctttcaatttcttgaaagggagcataacgtactatgttctctcttcgtttttgaagagcccaaaatacatactacctagttcgactatgaaagtcaagatcgttttgaagatgaaatctgatactatttaatttcctcttcttcatcatcatagtcttcatcatcttcatcaataatatcttcttcgatctcaagatcatcgtcgtcttcatcaagatcttcttcgtcaaaatcgtcggcttcaagatcgagttcttcctcaacttcatccaaatcaaggtcgtcttcgtcgatctcttcaaactcgtcaagatcaagatcttcttcgactgctttcttcgcttttttctttttcgccttgactgtcggctgagtttcttcatcaagctgatcatacggataccagctgcgaagcccccacgtctggtcagaaagcgccaggaagcggccgtcaatgtttaaatctgtataaaattgagcaatgcggtctccaagctcttcttttttcacgccgagcaaagatgcgatttcatttaaaagctcctgaaaaggaactggttttttatgttcttcaaataattcgtgagcgatttcaactaaagccatttcctttagctcttcctgtgaatattgtttgatacccaaggtcggacactccctttctattacttatatgtatctgttttatcaataatgaaagcgattttgtatcgttcttatacaaaccatacctctcattataaacaaaataaaacagaatatgctacccttaacagcgttaatttaaataattttacaagagtgatccgactgagagatgttttccgttaatccgcgagcattctggagatgaccagtctttgaatttcttgagtgccttcatagatttgcgtgatttttgcatcacgcatatagcgttctaccggataatcttttgtatagccgtagccgccgaaaatctgcactgcttcggtcgttaccttcatcgccgtatctccagccatcagtttggacatggcggaagcttttccatatgggaggcccgatgattctaaccacgcagcctgataggtcaatagccttgaagcttctatcattgtcgccatatccgcgagtttaaaagcgacgccctgctgctcggcgatcgattttccgaattgctttcgctcttttgcatattgaagcgccgcatcaagcgctccttgggcgatgcctacggcttgtgcagctatgccgtttctgcctccgtcaagcgtcttcatcgcgattttgaagccttctccttcttctccgagacgctttgatgcgggcactacacaatcttcgaacatgatttccgttgtcggtgaagaacggatgcccagcttcttttctttcttgcctgtaaaaaatccttcaaaatccttttctactataaaagcggtaatgccttttttctttttctcgggatcggtgacggcaaaaacaatgtaaatatcagcaacgccgccgtttgtgataaacactttggaaccatttaacacatagtcatcgccgattcgttcagcagttgttttcatgctgccggcgtcagagccagaccctgcttcggtcaaagcgaatgcgccgattttctctccgagggccagctgtgttaagtactctgtcttctgttcctctgtcccaaaggcaaacagcggccagctgcaaagagagatatgggcggaaagcgtcacaccggtggaggcgcacacttttgacagctcctccaccgcgataacgtaggccaaatagtcacttccgattccgccgtaatcttcaggccacggaattcccgtcagccccagatttgccatttcccgaaacaactcgcgatcgaagcgttcttgttcgtcccgttctgccgctgtcggggccacctcatgcttcgcaaaatcgcgcaccaattttcgtatcatctggtgttcttctgataatgaaaaattcattgcttctcccccattttcagatcagcgcctaaaacggattgagccagaagctcgacgacatcgtacgttttgacttggtcttcggcttccttcgcctttgtgccgtccccaagcatcgtgagacaatacggacagccagaactgatcaccgatgggttgactgcgagcgcttgctctgtcctggcgacgttaatcctgttgcctgtttcttcctccatccacattaatcccccgccggctccgcagcacatgccggtttcccggtttctctccatttcaacaagctgcacgcccggaatggctttcaaaatctctctcggcggatcatagacttcattgtaccggcccaaatagcacgaatcatggaaggtaatcgtctcatgaagcgggtgctgcggtcttaattttccgtttttcacaagctcggccagcacttctgtatgatgataaacctcgccttcaaatccgaaatccggatattcgtttttaaataaattgtatgcatggggatcgatcgtaacgatttttttgacatcatttttttcaaattcagaaatattcttctcagccagctcttggaacaaaaattcatttccgaggcggcgcggcgtgtctcctgaatttttttctttattgccgaggatcgcgaaggacacgcccgcgtgattgagcagcttggcaaaggaaattgcgattttctggcttctgttgtcgtaagaccccatggagcctacccagaaaaggtactcaaattcttttccttcttttttcatttcttttacagtcggaatctcagcatccggcgcctcgtcacgccaattttcacgttccttgcggttgagtccccacggattcccttgccgctcaatacttgtcattgcgcgctgggcgtcactgtccatttttccttctgtcagtacgaggtagcggcggaggtcgatgattttatccacgtgctcattcatgaccgggcattgatcctcacagtttcggcaagtggtgcatgcccaaatttcttcctctgtgatgacgtcgccgatcaagcttggattgtaatcaagcgccgctgcggcttcctgcgatccgctgcccgctgacgaagcagccagctgattgcctctcgtatgccgaaacgctgctgcgggcacccatggggagcgcgaggtgacggcagcgcctttttccgtgagatggtctctgagacgcaaaatcaagtccatcggagaaagcatttttccggtgcctgttgcaggacacatatttgtacagcggccgcactcgacacacgcgtacagatcaagcagctgagaccgtctgaaatcctcaatttttcccgctccgtagctttctttcgtttcgtcggtaaaatcaattttttcaagttttccggcagattccattcgattgaaaaagacgtttgccgggccggcgattaaatgggcatgcttcgactgaggcacgtacactaaaaagctaagcaagaacagaagatggatccaccatgcgatatagaaaatcaccgccgcgcctgttttcccgacaccgctaagcataaacgcaatacctgaggcaattggctcgctccaagaaagcccatgctcatgccaaatcagattcatcccgttcccaagcagaacggtcagcattaatcctccgataaaaatgagaacgagtccggctttgaaaccgcgtttcagcctcacgagcttttcgatataacgtctgtagaatgcccacccaacagcaattaaaatgagaaacgtaacaatttcctgaaaaaaggtgaaggcgggatagaccgggccaagcggcagattccggccgggagccagtcctttgatgataaagtcaattgctccgaactgaaccaatataaatccgtagaaaaacatgacgtgaatgattccgcttttcttgtccttgagcagttttttctgtccgaatacattcacccatatggcgtgaagcctttccttgaaccgttgatcaaattgttctttctggccgagcttgatgtaggccagtctcgttttgaccaagtacacaaacaaatagacaacgtaagcggttacaatcagaaataataatgcatttgcgatgagaaagccgctcattccaattccccctttttactgataaagaccgcgatcccctacccccgaatctgtataagattatctttatgataaataatgaatgagtgttcagtcaataattaaattcctgctgttcgggcacactacctttactacggaaaggagtgccggtatgaaggtatttatcgtgattatgatcattgtcgttattttctttgccttgattctgcttgatatcttcatgggccgtgccggatacagaaaaaaggcgtacgagcctgttttttcaaaaaagaagagtgacatcgaattgatccactgcggcgctgatctcgttgagcggatgatgaatgatattcgccaggccgcctcttctgttcacatgatgttttttattatgaaaaatgatgaggtcagccacaatatgtataccttgctgaaaacaaaagcccaagctggcgtatccgtttatttgcttctggattgggcgggctgccgggcaattaaaaaaacggcgctgcagacgatgaaaaatgccggcgtccatgtccatgtgatgaatcgtccccgttttccttttttcttttttcacatgcaaaaacggaatcaccggaagattacggtgatagacggaaaaatcggttatatcggcgggtttaatatcgccgaagaatatcttggaaagaaagcgaagttcggcaattgggaggattatcatctgcgcatgatcggagaaggcgtacatgatcttcaaacgctttttgcttctgatctaaaacgaaataccggaatcgaactgggttcggatgtttggccaaagcttcagcaagggactatttctcacaagatatatgcgaccgacggttattcccttgaaaacatatacttggccaacattgcccaagcgaagaatcgccttacggtttgcacgccttattacattccatcaaaaccgcttcaagaggcccttattaacgcaagaaaaaacggcgtatccgtgagaatcattgtaccgatgaaatcagaccatccgctggtacgagaagcagcttttacgtattattcggagctcttggatgccggctgccttatttatcgttattatcaagggttttatcatgtaaaagccctcatcatagacgaccatctcagcattatcggaacagccaacttcgataaacgaagcctgttcttaaatgaagaggtgaatgttgaaattgatgacgaagcgtttacaagtgaagtctatgccacaattgaggaggatatgaaaaagtcggagctgctgacgatggaggatttcagcaagcgcacattcaggcagcgcccggcggaatggctcggcagggcattatcttatttcttataaaggagagttcctatgattttcagattcgggttcgtttcaaatgcgatgagcctttgggatgcgtctcccgctaaaacattgacattcgcgcgttattcaaagctttcaaagactgaaagaaaagaagcgcttctgactgtgacaaaagccaatttgcgcaatacgatgagaacccttcactatatcatcggccacggcattcctttgtaccgtttttccagttcgattgtgccgctggctacgcatcccgacgtgatgtgggattttgtaacaccgtttcaaaaagagtttcgggagattggagagcttgttaaaacccatcaactgcgaacaagctttcatccaaatcaattcactctgtttacgagcccgaaggaatccgtcacaaaaaatgcggtaaccgatatggcgtatcactaccgcatgcttgaggccatgggcattgctgatcgctccgttatcaacattcatattggcggcgcttacggaaataaagacaccgccactgcacaatttcatcaaaatataaaacggctgccgcaggagatcaaagagcggatgacacttgaaaatgatgataaaacatatacaacggaagaaacgcttcaggtctgtgagcaggaggatgttccgtttgtctttgactttcatcatttttacgccaatccagacgatcacgccgacctgaatgaagcactgccccgcatgatcaaaacgtgggagcggatcggccttcagccaaaggttcacttgtcttccccaaaatcggagcaagcgatacgcagccacgccgattatgttgacgccaactttttgctgccactgttggaacgctttaggcaatggggaactaatattgatttcatgattgaagcaaagcagaaagacaaggcgcttctccgcttgatggatgaattaagctccatccgcggtgtcaaacgcatcgggggcggtgcgctgcaatggaagtcataaatgtgcaaaaataggtttacgacttgtcagctttgggaacttaggctatataagacaacaatcgatggaggagaaagatcatgaaaaatatcaagtctctgaaagtagccgcacaggcctttactttaagaaatttgattcatctttataaaatgtgccattccggaagccacgaggtttatatttattcaaagaaaacgatgtgcaaaatcaaaagcttaattgagcttgaaacgttccgcatggctcataatgaaaaggaatatctgatcgtagttgaaggaacaaaagcatcacagctcattgaaaaattccaaaatctcatcgagcctgctgagagagaagcgctctaacttacatacaaaaaaggatagacatctgtctatcctttttcttatgctcttacataatggagctgaaccgcttgtccaaattgttttgtcccttttaaccgcagttttgtttcatttgttagttcgtgaaacagcgggatgccgcttcctaaaacgacgggaataacagtgatgatgaattcgtcgatggcatcttctttcataaagtcattcacaagctctgccccgccagctatccagatgtttgagcctttttcctgtttcaaacgggcagtgaaggctctggctccctcattgataaacgtcacatgttcatcttgataactgtcgggcgatcctgtaaaaacatagcaggttttatcctgatacgggaaaaccggtgttagcactttaacgtgctcatatgtgctccgccctaaaatgactgtatcaacagtctgataaaaatcactgtagccgttgtcaccttcaccttcaaattcatccagccaatcgatgcttccatcttcttttgcgatcatcccgtccaatgaaacagcaatgtacagcacagtttttctttccatgttctcctcctatcgatgcaccatttgcccgaattgcgcttgatgcagcctgctgtataggcctccggcttcgatcaggtcttgatgacggccttgttcttcaataccgttgtttgtgacgactacaattctgtccgcgtctttgattgttgccagcctgtgggcgatgacaagcgtcgtgcgcccctcagacaactcttgaagcgccttttggatcgccgcttccgtctctgtatcaagggctgaggtggcttcgtcgagaatcaagatcgacggatttttcaagaacatccttgcaattgacagacgctgtttttgcccgccggaaagcttcacgccgcgttcgccaatcatagtatccaacccatcgggcatgttatggacgagctcttccagatgcgcctgcttcacagcttgccaaatgtcttcttctgatgcgcctagtcggccgtaggcgatattttctctaagcgtgcccgagaataagaaaacgtcctgctgcacgacgccaatctgcccgcgcaacgaagaaagcgtcatgtcttttatactgatgccgtcaatcgtaatgtcgccctccgatgcttcataaaaacgcggaagcagactgcaaagcgttgatttcccagcacctgacggaccgacgaacgccaccgtttcccccgcttgaatggataggttgatgtcattgaggacattgtgatggtcatcatagccaaacgaaacatgtttatagcggatattgcccttcaggccggaaacatctctcgcatcaggtgaatcctgaatgtccggctctgtctccatgagctccatatagcttttgaaacccgcgatccccctcggatacatttcgataatggcattaattttgtcaataggcctgaacagcacatttgtcaggagcacaaacgccacaaattccccgtacgataaggagccgcgaatgacaaaccacgtcccgcacaaaaggacaaacagcgtgacaaaccgggtcagcatatagctgattgacccgtttttcgccatgattttgtaggaagaaagctttgtgacacgaaaacgctggttgttgacggcgaagcgttctttttcaaacgcttcatttccgaacgcctgcacaagccggatgccgccgatgttattttctacacgcgcgctgaagtctccgatatccttgttcagcgtggtaaatgctttggtcatttttttgttgaaataaagcgctagccaaatgacgatcggcataatgataaacgttaataaagcaagctgccagttaataaacagcatcactccgaacgccccgagaatggtcatgaccgcaatgaataagtcttccggaccgtgatgggcgacttcaccgatatacattaaatcgttcgtaagcttcgacatcagcgttcccgtcttgttgttgtcgtaaaatttgaacgagagcttttgcaaatggtcaaaaagcgactttctcatatcagtctcaatattgataccaagcatgtgtccccagtaggtcacgatatactgaagagccgagctgagcgcgtacaccgcaaataacccgattgaggtcgcgatgatcagcccccagtccctgcccggcagcaaggtatcaataaaataattgacaatcaaaggaaaactcagctccattaaacctcccgcgatcgctgagaaaaagtcgagaaagaacaacgttttatatggtttataatatgaaaaaaattgccgcagcaccctatcttcccccaatgtataaataactgataatatttctcaattatactatacacgggctgttttgaaagatcagatttcttttttcttacagaacacctgaaaacaggcgggcaaatgactcttttgtccggtcagccacgcctcttttataaaagccgacagggctgagcttttcactttcctgcatatcctcttcaaaatggacctcaagggttcggatcgcttcggcatccgtgaagaacacattcacttcaaagttgagctgaaagctgcgcatatccatattcgcggtgccgacggaggcgagatcgccatcaatgatcatgactttttgatgcatgaagcctttttggtaggagtacacttcaatgccctcaaggagcagctccgggaaataggacctcgacgcgtattgggtcaaaaagctgtcgttcttctccggcaccataacccttacctctaccccctttgtcgccgctgcttttagcgccgtgcgaatggattcattggggacaaaatagggcgtggcgatccatattgatttctgcgctgaagaaatcatttcataataaaggtcgctcatgctttctttcatgtcagggcctgtcgcgacaatttgataaatgcctcctccttccacgggaaccggggtattgtactcctcttgatcaattagcacttcattggagacgtattcccaatccagcataaagatagcgtggagcgtttgcacaatttccccctcaagccgcaggtgtgtatctctccaaaatccgatgtgcggatctctgctgatatattccttcccaacatttaatccgcccacaaaaccggttttcccatcgatgatcacgattttccggtgatttctgaaattcagcttctggttgaaaaacccgtatttcagcggagaaaacgggacgatgtccacccccgcttgtttcattctcataatatctcttcttgccagcttcatgcttcctgccgcatcgtataaaaacctcacctcgacaccctggcgcgctttctccatcataatatccatcatgccgcgtccgagcatgtcagatttaaacatatagtattcaatatgtatgtaagattccgcttttctcattgctttgaaaatgtccgggaaggtttcttcgccgtttttcagcactttgatgttgcttttcgtattgatattcatatgggcagccctgatggaatatgtaaagaacctctcttgattgtccttcagccctgtcacttcgggcgtttccttcttgtcaaacagcttcctgagcttttccctgttgtacattcgttttgtcttaaacagctttccctttacataaagctgtcccgaaaacagataaaacacgtagccgacgattggaaaaaagacaagaatatggatccatagcagcgtgtgctgcgaggtgcggttttcaagaattaatgaatagatgctgaacaaaataatgcttatatagcaaagcaatcctccgtaaaactcaagcctggaaaccggaaaaaaccaaatgacatatgccccgatgagcatcatatataaaaagaaaaattccagtctccttttcagcatcctgattctctccaatctgattcaattacctctgtattacctcttttttctaatcgataaaccttgtaagtaaataacctctccgccgaaggaggagaggtttagaaaaactaactgtcacggaattcatccgcatcgtttctgcagaaataaagcaagactattggcaacgccgagtgaagtctgatgatacaacatgagcggcaggccgaacccgctcagcactccggcaagcgccgaaaaagaggcggcgctgtgactgcaaatacggtggatagagtgaatttgatgcccactctgatgagagaaaatatataaaacgggatattgatcagaaagatataaggagttagtcaggctgagtcataatctgctgttccgccggtttaaaatgagtaaaatccgttttattcttgatcttatttccaaatacaaacacaacaggattcccggccgcccagccattacctttgcagaaaaaaccccctcctgggggggattttcatgagcgtttccgatatacaacgtagctgcgggtcagatacttgagcggcagactgaacacatgaaccaatcttgtaaacggccacaggataaaaacgacgtatcctatcacaatatgaaacttaaaccatagcgggacactctccatcaaagaggcgtcaggccggaacaaaacgatttccctgaaccagggcccgactgtggtccggtaatcaaatcctttcgaatcaatgttgagaaacgtggccgcaacgcccgacagcatcatgaacagcagcaggagcagcgtaaggatatcggatggcgagctcgttttgcggattcttttgtcaaacagccttctgtacgtcaggatgacaagtccggtacatgccgcaatgcccgccggcaagccagcgccaatcgccattttgtgatacatatgctctgaaatgccaagggaagcatacacgccttccgggatcagaatccccatgacatgcccgccgacaacgcacagcagtccccagtgaaaaagtgtgctgcccgccgcaagttttttcttttctaacatctcgcttgatttcgccgtccagccaaattggtcatgctggtagcggtaaatatggccgccgataaagattgtcaatacaatgtatggcataataccccagaggatctgcccgctcatgcctgaacagccccttcaacgctttcacgtacgccaatgttttcaagcgcggccagcagcacgtgcagcagttcagcgtatatactgtcatttttttcgagacgggatgccagctccctcacattggacagatatttctcaaacacgcttctcgctgcttcaatttctgcagccgcagcaaattccagcatcagcggcagataatcaggcagctctttctctgtcggcaggaaaccggattgctcgtatgtgttttttaaatgcagcaattcaacgccgcgttccctttgctcgcccgagttaaagtaggtgacatacatatttgtttttttcccaaagtcgaacgtatagacatagtgttcaatcagcgcttccggtgaaaagctggctgacgcctcgaaaaagtgcagcagcttctcccggatttgccggttgctgatttcatggataagagccttccaatcgggaatctcggctctccactcttcatccggataagagagaagagaggaaagagcggagaacgtcatttgccggtctgtggtgttcatcttgttacacctcatttatcaaaagttagaaacaggagccggggccgcctgaaaatgataagccgcagctcccttgttcagcatataaatctgaaacttcttctcgatgactgctcggtatcacaaagcggtcatcatatttggcaatcgcaagcagccgatacatatcttcaatttgctgttctgttaagccgacactggagatcagttccggatcgattgatttattcgtctggatcgctctcatatactggcgcatgacagacattttctttaacgttgaccgaatatgatccgtatcaccggctgttaacagctgcgccaaatagtctatcgggattctcatttggtcgatagccggaaaaatatcttccgcggattgccggctgccttttccttcaaagagattcataatcgggctgagcggcggaatgtaccacaccatgggcagcgtgcggtactctggatgaagcggcagcgcaatcttccagtcaatgatcattttatagatcggcgattgctgcgcagcctctatccattcagccggaatgccttgttcttttgccagcttggcaacctcaggatcatttggatcaagaaaaacgtccaattgggaatggtagagatccttttcattttcaacagatgccgcttcctccactttgtccgcgtcatacagcatgacgccgaggtagcggattctgccaacacacgtctcagagcagatggttggcagtcccgcctccaaacgcggaaagcagagtgtgcatttttccgctttgttcgtttgccagttaaaatagacttttttataaggacaggatgagacgcaatatctccatgaacggcatgcgttttgatccacaagcacaatgccgtcctcctcgcgtttgtacatggcgccggatggacaggatgagacgcacgccgggttgatgcagtgctcgcaaatacggggcaaatacatcataaagacctcatcgaattctgttttgatcgattcctccatcttttgtacgttgggatcttcaagtcccgttatgtggccgcccgcgagatcatcctcccagttcggtccccattcgatattcataaaatcccccgttaaggacgatttcgggcgtgctaccggctggtgttttttctgcgggctgttcgttaatgtttcataatcatagttccagggctcatagtaatcatcaatcgacggctgattcggattatagaaaaggcctgcaagccgattggttttcgagcccgatttcagctcgagctttccttttttcaatgtccagccgcctttatatttgtcctggtcctcccattgcttcgggtagccgatgcccggctttgtttctacattattgaagtacatatattccgcaccggaacggtttgtccacgtgtttttgcaggtgacgctgcacgtgtggcagccgatgcatttatccaagttcatgaccataccgatttgcgctttaatcttcaagccaatcgacctccttcagcttgcggatgacgacgttcaggtcgcgctgattccccgttggaccgtaataattaaagccgtagctgagctgggcgtagccaccgatcatctgtgtcggcttgacgtgaatccttgtcgggctgttatgggtgcctccgcggttattcgtcagctttgtgccgggcacgttgatgtggcggtcctgggcatggtgcataaacgccattcctttaggaatccgatgagacaaaacggctctcgcgacaacaacaccgtttcggttaaagcattcaatccaatcgttgtctttgatatccgtgtcctctgcatcatctttattcatccacacggttggcccaccgcggaacagcgtcagcattggcagagaatcaaaatacatgctgtggacagaccatttattatgcggcgtcaaataattgaggacgatttcttttccctcttgatcaggccgcttgctcagaaacgggcgatgctggaggatcggtttgaatgtcgccatcgtttcaccgaattccatcatcagttcatgatcgacataataggattgtctgcctgtcagcgtccgccacgggattaatttttcaacattcgtcgtaaacggcgaatacctgcgccctcctttttcagagccggaaaacgctggagacgtgatcaccgttttcggctgggctgtaatttgttcgaacgtaaagcactcttcctcgcgttcttccgccaggtctttcagcttcaggttcgtgatgttttcaagtgattcccatgctttgacggcgacctttccattcgaagtggatgatagggttaaaaccgcttctgccgcctgctttgcttcacttatatttggacatccctttgccacgctgtctgaggtgatttctcccagtctctttttgagtgattcatattcatcggctattgaccagctcatcccttttgttccgctcggctttaaagcagcgttaggaccgagtgcggtcattttatgaaaaatgtgtttgtaatcccgttcaacgacttggatgttcggcatcgtttttcccggaatggcttcacattcgcccttgctccagtcattgattttgccgaatggctgggccaattcctgcatggtgtcgtggaggagcggcgtcgcaaccacttctttcaccggctccatattgacttcttctgccagatcggaaacggcttttgacagcgccttgaaaatatcccagtctgacttcgattcccacggagctgagatcgccggagcaaatggatgaatgaacggatgcatatctgtgctgctgagatcgtgtttttcataccatgtcgccgccggcagcacgatatcggaatacagcgccgtacccgccattcgaaaatcaagattgattaataagtcgagctttccttccggcgcctgctcccgccatttgatttcttctgggcggatgctgtcgctgtcgtcattcattaaaccgttcgttgtccccagcaaatgcttgagaaaatattcatgcccttttcctgagcttgagatcagatttgcccgccatacaaagagattccttgggaaattcacttcattgtcaggatcttcaatcgcgaatttcagttttttctcttggagctgtgaggccacgtacgcacctacgtcttcaggtgttgctgcccctgctttttcagcttctttatacagatcgatgccattttgattgaaagtcgggtaagacggaagccaccctagccgcgccgccagcacattgtaatcagcgtggtgcttgtagcgggatgacgcagcaatcggtgatgccaaatcactgatcggctggtcctcataacgccactgatctgtcgcaaagtagaaaaatgaagtgccgttttgcagcttgggcacgccctcccagtcctttgcagttgcaatcgtctgccatccttcagcaggtcggagcttttcctgcccgacgtaatgggcccagcctccgccatttacgccttgggcgcctacaagcaaaacaagatttaacactgctcggtagatcgtgtcggagttgaaccagtggttaatgccggctcctacgataatcatagaccggccgtctgtatcgatcgcattttgagcaaactctctggcaatcttaacgacagcttcttttttgattcctgtcatttgttcctgccaggcaggcgtaaacggctcaggatcatcataggagacagcttgttgttcgccgatgccccgatttacgccgtagttagccagtatcaagtcaaacacggtcgtgacgtacgtctcttcaccgttcaggttcatttttttaataggaagatcccgctcgagcactttgtttccgtcatttgaaaaatacgggatgcgcaccgtgccgatttcatcctctattccgagcacagagagacggggttcaatcggttccccggtttcttcatcaatcatgtgcaggttccatttctgctgcccgtcccagcgcgagcccattgtcccttggggtatggcaaatgaacttgtctgttcatcccaaaccgcaggcttccactgatcatgctttgtcttccgcccgatgtccttcgcatgcagaaaccgtcccgctgtgtatacgccattttcttttgacagagtgacgagaaatggaaaatcagtgtattgcttcgcgtactcaataaaacgttcagtttcttggttcacgtaaaattcctgcagaataacgtgacccatcgccatcgcaagcgccccgtcagtcccttggcgaatactcagccagtcatccgcgaactttgaggattccgcaaaatctggactgatcgaaatgaccttagcgcctttatagcgggcctccgccaaaaaatgcgcgtcaggcgttctcgttaacggaacgttggagccccatgtgataatatagccggaattgtaccaatcactgctttccggaacgtccgtctggtcaccccaaatttgcggggatgctggaggaagatccgcataccagtcataaaaactgagcatagggcctccgattaacgacataaaccgggagcctgatgcgtggctgatcatggacatggccggaatcggagaaaaaccgacgtttcggtcaggcccgtatttcatcactgtatacagcagagaggctgaaatcagcttcagcacctccggccattcagcgcgcacaaaaccgcctttccctctcgcctgtttataggacttcgctttttcagggttttcgacgatcgatttccaggcttccaatggattttgatgcgtctgcaatgcctcccgccacaaattgatcagcacaccgcgcacgtatggatatttcacacggagcgggctgtagatataccatgaaaaactggcccccgcgggcagcctctcggttcaaaatcaggcatatccgggcctgttgatggataattcaaattttgcccttcccacgtgacaattccgtttttcacataaatattccagctgcaagaccctgtacagttgacgccgtgggtggagcgaacgactttgtcgtactgccatctgtttctgtatacattctcccaatcgcgatcctcgcgggtagtttggctatgtttatttgaatggtgttcgataggagagaaataattcaatctcctaaacaacggactcattttctttttcttcatgagagttcactccttccgagtcaggtgatgctaagttcactataaacagagacagcgtgttttcttgtgaactatgtcacacactctgcttttttcacaaaatgttcacacaaaggagaaggaaggctgagttcaggcaggacgcttgggtcattagctgcctttcattcaaagatcaaaaaaaaccggctctatttaagaaccgggctcggcgttttcatcctgtgatgtatgcagataccgcaaaaataattgataggaacaaaaaacattttgctgaagcatagccaaaaagttcatttgcagctgcggatgataagacatcattttcttaaatatgtaatatgggatgttgagaatcagaatgtctgaagtggcattgactgagataaagggcgataaataaagcccgcctttttcatcaatcggaaacacatcgcctttttcccacagcgcaacggttttcgacccttcagggagccttgtgtccataaaacggacactgccttttaatacaatataaacagattgagaatgaagaaaagatggagactgatcacatgaaccgcggataaacgtgccgtttttcagcaaggtttcgacaatggatagaggcacttcattaaacataggaagttgtttcagaaataataaatagtcacactgattcataggaaaacctcctgtgctaagctaaggatagctttagtgtagctcgactgagcctgtacagcagtgatgtatttcacagcctgtatgatgaatgtcacttatcaggagggtgaatgcatttataatgaaagaaaaaaggaggatttcgatgaaggcgctgattccgaagcagcacggggcgtgggcgatgctgctgatcccatttttactcggcatggtcaagggaggccccgttatttggcatattccgctcttcctaggctggcttttcctatacttagcggtttatcccgttacgcttgccttaaaaaagaaccaaagcaaaccttatcaaaagtggatgtgttattacggttttcccgcctgctgctttttgatgatctcggtctttcataagccgcctctcatctgggtgggcgtttctttactgccgctgtttctcatacatatgtattttgcccgcagaaaaaaagaacgagccctattgaatgatgttgcaggtgtcttgttcttttgttcgggcgggtttgcgagctgctggctggggatgggaaccctcgacggctgggcttggtttattttcttgcagtctgctttattttttatcgggagttccttttatgtgaaatcggtgattcgtgaaagaaaaaacaggacatttgcatactggtcatggggatatcacctgctgctcccctttttatccgctcttttcggagcaggatgggcgtttctcgcttttatcccgagcagcttgcgggcatggttttttcatggaagggattggcccgtaaaaacgattggcattctggaaatcgtgaatgcctgtttctttcttgccgtcatgtgcctgtttatcacaaggtaaaaaaacaaggacaccgctgtccttgttttttcagtcaatattgcaaatctccagcgggcaattttcacactcaatctcacatcgtaaatagtcccgcttgtgcaaaataatttttccggattcgtctatcgaaataaccccttttttgcggagatctcccagcatacggttgatgctttcccgtgcagccgcacaaaactttgccaaatcctgatttgtcaggacaatgttaatcagaatgccgtcgcttcgctccactccgtagctgtttgataagcggataagggtagaatagagcgccccctttttgccatgaagaagcagatccctgattttggactgaatcttccggaggtgcgtgctcatccatttcatgaactcaaatgtcaaagcgccgttttggattaattctttttccagcttatttttattaatgacgagcacctcgccatcctctagtacttttgcactgagcatataccttggttcttcagtgaaaagtgttaattctccgacgatatcatgcttttggcagattctaagcgtcaggtcttttccgtcagatgtcagcttgccgatttcaatgagtcctgattgaatcagataaagctcttctgcatccattccttcccgaaacaaatacgtgtgtttttccatttttcttttcgtgctgatcgattccagcaattcatacagatcgctggatatatgatcactatcagatggtcgaacagagagaaaattcatgagctcacctcgaagaaagtcacgttgtgtgtttattgtaacgtgaattgatttgtacccatcgagaaaaaactaacaatcttgtgaatgccccagtgttagttgatgctctggctgtttctctccgtgtgtgttttcattctttcctgccaatacatccatatgacaaggacaaaactggctaacgccacctctgaaagcgccataaacccgatcgcgtactggcctgttgcctgaaatacactcgccaatatgagcggaggaaaaaagccgcctaaaccgcccatggcagacacaatcccattggcaatccccgcttgcttcgaaaaatagaaaggaaccagtttaaaaacagtcccatttcctacgcctgagcagacggccacggttaatgatccaaacgtataaaggccgattgtcggcgagaacgataggataatgcctgataatgtaagcccggcaaaaacaaacatcaagatgcggagcgggctcattttatcagccaggaatcctcccgcaggcctgagcagcgtagaaaccgcaataaagccagccgtccgcaagccggcatctgcaggattcagcccaaaatgctccaccagaaagttcggcagatagatagtgaaggcgacaaaggcaccgaacgtaataaaataaaacaggctcagaaaccatagcacatgatttcggtaaacagctttgatttgagtcttaacagaaactttgaccttcttctcatgcctgtcgccaaacaatacgtgcagtaaggcaaagacagacagcaaaatcagatacatttgcacggttgatttccacccgacggcttgagcgataaccggcgctgcaaatgtcgtaacggctgtcccgatatttcctgcaccgtaaatcccattgacgacaccgtgcttttctttcggataatatttcgggagggaggtcaccccaatggaaaacaccgctcccccgatccctaagaaaaagccgcctgcgattaaatcaaacagagaatccgcgatactgatccaaaatacaggaaataaaagcaggatgaaactgaccataaacatgagccgcgcgccaaacctgttcgttaaataccctaaaggaatgcggagaagcgacccgaggatcacaggaatcgccgtcaccaaagaaatctcacccttgcttaaatgaatatctaatgtgatttgggaaatgagtgatgaaatcagcacccaaaccataaaccctgccaccaagcttaatgactgtaacgataattgaatgtgttgacggttgatcatttggcttgcccctttcaatgattcaataatcagtcttatcatacaaaaactcggcaaacaggattgtgaattacatcacacgtttttctcataaaaaaaggacaaagcccgaagactttgtccttttgatcgtgattacattttttccggagccgatacgccgatcagctgaagcgcattgttcagcgtaatttgcgttgccttcattaaagccaggcgcgcgcggctcttctcttcattttcagggtcgatgactttctctgcgttgtagaagctgtgcagagcagaagccagatcataaatatagtttgtgacacggtgcggaattcgtttttccgctgcttccgccactgcctctgggaagccgccgatcgttttcagcagatcgtattctttttctgattgaatatggctgaaatcaagatctgccgccggtttaagtccctgctcttccccttggcgaagcatgctgcaaatacgggcatgcgcgtattgtgcataatacacagggttttcgttagatgttgatacagcaagatctaagtcaaaatccatatgggtgtccgcacttcgcatcgcaaagaagtaacgaacggcatccaagccgacttcttctatcaggtcacgcatcgttacggctttaccggtccgtttgctcattttcattttctcgccgtttttgtaaaggtgaacgagctgaatgatttctacttcaagcgttcctttttcatagcccagcgcttcaattgccgctttcatacgcgggatgtagccgtggtgatcggcgccccaaacgttgatcagcttatcaaagccgcggtcaagcttgtccttatgatacgcgatatcaggaagcaggtacgtgtacgtgccgtccttcttgatcaatacgcggtctttatcatcgccgaacgtcgtggaacggaaccaagtcgcgccgtcttcttcatagacatggcctttttcgcggagcgcttcaagcgccgtgtcgatttttccattttggtacagtgaagtttcggaataccacacatcaaacggcacacggaagttttccaagtccttgcgaagcttgtccagctcgtatttcaggccgtattcacggaaaaacgcgaggcgttcactttcctcttcgttaacgaaacggtcaccgtattcctcagcgagacgctttccgatcgcaatgatatcctcgccgcggtagccatcctccggcatcggtttttccaatccgagcgcttcaaagtaacggacttcaacagaaagcgccagattgttgatttggtttcccgcatcgttaatgtagtattcgcggcttacatcgtaacccgcttttgaaagcacgttgcacaaggaatcgccgacagccgcccctcgcgcatgcccgaggtgaaggtctcccgtcggattcgctgatacgaattctacctgaactcgttcaccgtttccgatgttcgtttccccgtatgcttcccctgcttccagtacagacggaatcagctttgttaaatattgattgttcatatagaaattgataaaacccgggccggcgatatccagtttttcaatcgaagcctttcctttatcaaaatgggcgacaatctcttcagcgatttggcgcggcgctttttttgccactcttgccagctgcatcgccatattcgttgagtagtcgccgtgtgttttatctttcggtgtttctaaaacaacattgggaatctggctttcttcagccagtcccgctttcagaacggccgctttaatttcttctttcagcacgtccttcatttgttccgcaatgttcatgcgtgagttcctccctcatacgtgatcgtcatattatgtaaatgctcctgctcgtctccgacatgcatgtcatatgcgatgctgatacggcctttttcttcatcgagatcagattgaatcgattttgtgcttgttttcagctcaagctcaccaaatgacattttatatttagcaattgtggaagctcccgttacgaaacgctgattcattttgacagcgcctgacctcatgaccaggacttcgccttcgcttactttcacaatcgttttgactttgcctaagtcgtgttcttcataataagatagatacactttattttgttttacatagtaaaatccggtggtgcggaattcgatgacttcttggtttccgtcatcctcgatcacagacttcacatggagtgttatcggtgtctcttgcttcattctgacacgtccttttcatcattccactttgacttgaatagtataatcattcggtttgtaaacttcaactgcttctatcttaccatcattgctcatcagatttgaagataaacctcataaaaagcatttccttatatagaagagaaaatcatatcactaattacctttaggaaatgttacatttttccgaaatctatcatttccttttcacatttttttcaaaatatatgtattgaattagtaatttgatagttttaagataaaagtacaacatagatctgctagaaaaacaaaaaaagggaggattcaattatgaaaaaagctgtcattgtagaaaacaaaggttgtgcaacatgctcgatcggagccgcttgtctagtggacggtcctatccctgattttgaaattgccggtgcaacaggtctattcggtctatgggggtaaggatctcccaaaagggcatagtcattctactatgccctttttaagtaaattacaatttttaactaaaatctacctcttggatatacatacacaaccgtttttcatttgaatcatatgtataggggatggtattttgtttatagagcagatgtttccatttattaatgaaagtgtaagggttcaccagcttcctgagggtggcgtgttagaaatcgactacttgcgcgataatgtctccatttctgactttgagtatttggatctcaacaaaacggcttacgagctttgcatgcgcatggatggccaaaaaacagctgagcagattttagctgagcaatgtgcagtgtatgatgaatcaccggaagaccataaagattggtattacgacatgctcaacatgctccagaacaagcaggttattcagcttggaaaccgggccagccgccatacaatcaccacgagcggaagcaatgaatttccgatgcccctgcacgccacctttgaactgacgcaccgctgtaatttgaaatgcgcccactgttatttggaaagctcacctgaagcgctcggcaccgtgtcgattgagcaattcaaaaaaacggctgatatgctgtttgataacggtgtattgacatgcgaaatcacaggcggagaaatttttgtccatccaaacgccaatgagattcttgactatgtgtgtaaaaagttcaaaaaagtcgctgtcttaacaaacggaacactcatgcgaaaagagagtttggagcttttgaaggcttacaagcaaaaaatcatcgtcggcatttctcttgatagtgtcaattccgaggtccatgactcctttagagggagaaaaggctcttttgcccaaacttgtaaaacgataaaattgttgagtgaccacggtatatttgtcagagtcgccatgtctgtcttcgaaaaaaacatgtgggaaatccacgatatggcccaaaaggttcgggatctcggggcgaaggcgttctcttacaattgggttgacgatttcggaagaggcagggatattgtccatccaacgaaagacgccgagcagcaccgcaagtttatggaatacgagcaaaatgtgattgatgagtttaaagatctgattccgattattccttatgagagaaaacgcgcggcaaattgcggcgctggctggaagtccattgtgatcagcccgttcggcgaagtacgtccttgcgccctctttccaaaggaattttcattgggaaatatttttcatgattcctatgaaagcatctttaactcccctctcgtccataaactgtggcaagcgcaggcgccgcgcttcagtgaacattgcatgaaagacaaatgcccgttcagcggctattgcggaggctgttacttaaaagggctgaactctaacaaatatcaccgaaaaaacatttgctcttgggcgaaaaatgaacaattagaagacgtggtccagcttatttaggagggaaacgatttgtcaccagcacaaagaagaattttactgtatatcctttcatttatctttgtcatcggcgcagtcgtctattttgtcaaaagcgattatctgtttacgctgattttcattgccattgccattctgttcgggatgcgcgcgcggaaggctgactcgcgatgagcattttggatatacacgatgtatccgtttggtatgaacgggacaacgtcatcttagaacaagtagatttacatttagaaaaaggcgccgtttacgggttgcttggggtaaacggcgccggaaaaacgacactgattaatacgctgacaggcgtgaaccgcaatttcagcgggcgctttacactgtgcggaattgaagcggaggccggcatgccgcagaaaacatcagatcagctgaagactcaccgttacttcgccgccgattatccgctgctatttacagaaattacggcgaaggactatgtgtctttcgtccattcgctttatcaaaaggatttttcagagcagcagtttgccagtttggccgaggcctttcatttttcgaaatacatcaacaggagaatttcggagctgtccttggggaacaggcaaaaggttgtattgatgacaggcttattgctgcgcgctcccctatttattttggatgagccgctcgtcggtttggatgtggaatcgatagaggtcttttatcagaaaatgcgcgagtactgtgaagcaggcgggaccattttgttttcttctcatctgctcgatgtcgtgcaaagattttgtgattacgcggctattcttgacaacaaacagatccaaaaggtcattccgattggagaggagaccgatctgcggcgggaatttttcgaggtgatcggccatgaataacataatccccatcatgtctttgctgttcaaacagctttacagccggcaagggaaaaaggacgccatccgcattgccgcaggccttgtcattctggccgtgtttgaaatcgggctgattcgccaggccggcattgatgaatcggtgttgcgcaaaacgtatatcatactcgcgcttctcttaatgaacgcatatatggtgtttctttctgtgacatctcaatggaaggaatcttatatgaaactgagctgcctgctgccgatttcttcacggagcttttggctcgcccagagtgtcgttttgtttgtcgatacctgtttgagaagaactttattcttttttattttaccgctgttcttatttggaaacggaacgctgtcaggggcgcaaacattgttttggctcggcaggttttcgttttttaccgtttactccattattttcggagttgtgctaagcaaccacttcgtcaaaaagaagaacttgatgtttctgctgcatgcggcgatattcgcctgtgtatgtatcagcgccgctttgatgccggccgccacgcttccgctttgcgcggtgcatatgctgtgggcggtgatcattgactttcctgtctttctgcaggcgcctccgcagcagagcaagatgcattcatttatgcggcgatctgaattttcgttttacaaaagagaatggaaccgatttatctcttctaaagcgatgctgttaaattacgcggtaatggcggcgttcagcggcttcttttcgttccagatgatgaataccggcatcttcaatcagcaagtggtttatatcgtgatttccgcgcttttgctcatctgctcgccgatcgcccttttgtattcgattgaaaaaaatgaccggatgctgcttatcacgcttccgatcaagcggaaaacgatgttttgggcgaaatatcgcttttattcaggcctattggcaggcggatttctccttgtcgtgatgattgtgggtttcatcagcggccgtccgatttcagttctcacttttttgcagtgcattgagttgctgctggcgggagcttttatcaggttaactgcggatgaaaaaaggccctccttcagctggcagacggagcagcagctatggagcggtttctcaaaatatcggtcttatctgttttgtcttcccctattcttagccacattagccggcaccgctgtatccttggcggtcattccgatagccggtctggtcatagtctattacctgcaaaaacaggatggtggtttctttgatacaagcaaaagagaacggcttggaagttaacctgctgaagactcatcaattttcaactatttcaatcgccgcgagctttctgaaaccgatcgaaagcgcggcggaacctgaggaagaaacgatttatttttacggcgccgccgcatacctgaaggagcaaattattgacgctttcggttgtgctgccggcagccgtttcatgtactcagcgaatctcttttttgatcagcagctgaaaacctgcgggacccgtttgattcacccattatataacgggaatcttcatgttgacgccctgctgaaaacttttgcagacttgtctttcccttcttctctttcattcgaagcagttgaaaaggccaggaatgagctgctgctgagaatcgaaaagaaattcactgatcctttctcctactcggcggcgcgcttggctgaggaggtcttcggaaacccgatgtacggcacaggcatgtttggccggaaagacaggataaaggcgattcatcctaaacggtttctcgacgcaacggactttatcgttgatttagtgtcccagcaaaaacagctgaacatattgggacaagtacaagcatgtgatgttcggggacatgccccgcaaacgtccgctgtaacgtccgaaagaatacccgtaaaccggcatgtttttgaaacagagacacgcagcgctgcaggtccttccgtcttgacactcggatttgactgcggagagatgaaagatgccagcgattatatcaaaatacagctaatagacggattactgggaaagtacggccattccgctttattcaagcacttcagagagaaggatctggcagtctatcacgttatcacccgttacgatgtcatgaacaatttgctgcttgtttcaatatgtacagatcagcttcatgagatagacattcccccgcgcgttttggaagctgtctcagcttttcatacagatgagcgggaactagaacaggcaaagcagtttttacgcaatgaattgctgctgcaattcgattctcccgaaggtctattggcctatatggggatcctgcgccgcttctcctgcacgaaagaagccttgctggatggcatctcagcggttacatgccgtgatgtattgcaattcatagcgaccatcaattatatcggagctcatgtagtaaggggatgaagagatggaaaagaaagccttttttcaacaactggatgaacgaaccgatatcagatacacagacagcggactaaaaatattcagattgaaattcccccgcgcccacctgcggctgtgcaatgtaaaaatcgattttggaagccgggatgtatgtatacgggcagaatccggtgatacactgcttccgtatggcacagcgcattttttagagcatcttctcttctggcataacggccgcaatctgtacagtgatttttttgcgcatggcgcgcttttaaacgcattcactacctacaccgataccaatttcatgtttacctcattaccggatcggctcagacaaacgatccccatcctgcttgatgctttatggaaccactcatttgacaagaagattgtcgctcaggaaaaagctgtgattacaagcgaaattcaaacagcacaccttaaccatcagctctcatatcattatcagctgatcagcatgctttctccctcctcaccagctgccgttttccccgcaggcagaatcgaagatattgaggcgctggacatcagtgatttacaaaaagcctataaggctgcctaccaagcccatcggatgacgctgtttttgattgggggctcagaaaatacagaaacgcttttgcctcctcacctccagctggaaaaacgtccggattatcatgctgaaagaaaaatcatcccggcatgccctccagccctctcacaaaaaatggtgctgggtgatgaggagcggatggaagatacatggaccggattacagatcggcgcacttcccgggcaaaacgatctgttggcgataaagctttattgggatatcgcggctcgtattctatttcaattagattcaccgttttttcaagagattcagcaaacgtaccgtctggaaatcgatcgcttgtcagccgagacttatatatatgaggatggcggtttcttgatccttcacagtcaagggacccattcttcagcttatatcgatgtggcttcatactatgtcacacagaagaaagaacaggttgccgcctggcttcaatacggcaaggactctttgacagacgcgatcatttatgacagcgattatgtgcgtaaatgcttcgagtgggcagccgagtgtgacaggtgcgattgctcgtttcttgacatgtaccacatcattcaagatatggatgcgcaggttttcttgtctctcattgatgcaatggcatcttctaacaaagcgatcattcacgtttctcagaaagaggcgatcagacaatgaaaaaaagcactgtctttacccttttattgctgcttataggtatggcggcttattccttcggatgggttcaggccgttgccgaagccgccgcccaatatgtacagatgatcaacaatgatgctgttcggctcggactgctggcttgtaccgctgccctcctgatgctgcctgcttttctatatcttcattatgtcacccaatccgtgaaaaacatgacagcagcttttcagaaactcacacagtctcatcaaagctgctgtgactttcagcaacacaacttgtgcagccgatatgcagaagacgtcaaatcgctgcgtgacagctataaaaacgtccgccaaacatacgtgatggctgccgtgttgtgccaagtcatcatattcggctgcatgttcgaaatcgttaaagccgtccctttccgccttcacacgccccctgccctttcaatgggacttgcgatgctactgattctgtatttattgttttgcatgcgaacttatttgcggcagcttttccggcacggcagcctgttcagaaaagtgtttgcgggagcgctggcagcagccgggatttggtggatactcagtttctctataagtgaactgctgtttctgattatcctggctaccattcagcaaatcggatcatttatttataaacgattctcttatcgcagcaccgcttctcttgatctataaaatagctacatcgcaatcgcagacggacccgcgccaaccggaatcaccgtcacggctgtataatcacttgtgcggtacacggtcacagcattgtcgttgggctgtgccgcataaatatactgtttgtccggcgttacggcgaggtcaaaagcgccggggagagacacgtttgcaatgatcctctgtctggccgtattaactacatataagttattaataagaaacggttcactatatggctctagaaaataagctctagtgctatcgagagaaaatacaatcgtcctcagcgtttcaaataaacggctgaagtcccctcccctgcttaatggagacaaactaatctccgttacacctttcggccacagctcaccattcaacacgtacgcaaaatttccagcgtaaggagttgcaattaaactgggaaattcaaatgtatctatgatactttctaccaactgcccagtatttatatcatatttatcaaccgaccaactgcttccattagcggtatagacatactgtccattcggatcaagagcaaagtctaaagcgccgggtatcggaatgacatcaatgaccgattgagaggccgtgttaatcacatatatagatccggcggccatcacgtatgcgaactcatcttttggatcaaattcgatctttctcggccctcctccaacagtaatggtatttatgatggttaatgttttattatcaatcactgagacaaggttggtatttccatggaggacatacgtgaatgctttatcgaaagtaacgcctagattagttggcacgtcagaaaaagggattgtttttacaacagtgtttaaatctgcatcaataaccgaaaccgtgctgtctccagtattggcagtaaacacatacgattgagggtctggtgatggcggtaaaacaagtgtcccggtcaccgtaagcggactgccgtagaaaggcggtacaatgagcagatcttccactgttatttgactgaaatcaggacagcggccagactgtgctgcataataaacaacttgatcaatctcttcggtatgaatcacagaaaccgccccattgccttgtccatattgatttcgcacaggcgacacactgacaagaagcgtaatggtcccttgtactctcacagcatatcgaacaccgatatcttctggttccggcccagtctggattaagcaaggctcactgatacaggacacattgtctgtactccatgtaacagccgctgacgcttcggccgaatcaaccttgaagccctcagggatatctatcggcacttgaaacggcgcttctcggctaatttcctcatcacaaaaacagaaacaattttcctgtaaagcagaaagatcattctttttcatgatttcacgtccttttagaaatgcacaacatgcagcggttaaatcgtaatggcacccggtgaaaccccaagagatatcacagtttcctcagaataatcatctgtgttgtaaacaatgatgctctgctctataaaacgagttgcatacagaaaatcgccattcggggtaaacgcatagtctgttgctgattgcggaagatttccaattacacctgctccattcggactgacagaatataaattgccagtgaagctgtcatgtaaatacacctctgatccactcgtaaacattacatatagcccgtcaggctccagctcttgggtatccctgatcgtaaacgtatttaaatcaataaccgtcaaataattgaataagaattcttgttctaatacatacgcataccgctccgtagaatctgtttctatggatgatacgataagctctcgttcaatcgttcctaagacttcaccggtagataagtccactttttgcactaacccaaaattaagaacataggcgaacaacccattggggtcaattgcaatatcaaaaccttctacaggaatagacctctcaacagtcaacgtatcaattccaatcacataaatggcagtaccggtgaaaacataagcaaactcatgattagggataaatctaatcaatcgaggcggctgatccagcaatatagttgctgtcactgttaatgtgtcataatcgatgacagaaatcacattattgttgggatgtaagacaaacacagcgcttttatctggcgtaatttcaatacctgccggattgtacggaagagcaatcgttgtcacaacagaatgagtgtttgtatcaatcacagaaactgattgatcatttggattcgctgtaaacgcataaacgggttccggctccggtacaagcacaatcgtccccgtcaccgataaaggactgccgtaaaacggcggaacaacaacaaggttctcaatcgtgatgtcactgatatccgggcaatcatccggttcatcggaataatagacgacttgatcgatttctgcattgtgaatgacggaaacagccccgtccccttgtccatattgatttcgcacaggtgagacactgacgagtagcgtaacggttccctgcaggcgcactgcaaattgaacaccgatctcatcaggctctggccccgtttgaattaagcaacggtcactgacacaagaaaggctgtctgcattccacgtcacgtttgcaacagcttcagccggatcaacgacaaatccttcaggtaattcaatcggcgcttgaaacatggcttctcggcttgcttctccctcacaaaaacataagcactcttcttgttctgctcctgctttttctttaaaggaaagcttgttttttctcattccttcacttccttttcagacatacactgctcacgcagatataacagaatatggaagtgtaacgtgtttgcttgtacaaattgctgagggtaaacgcttctttttgaaaatatatctccaaacatgcggtgtaacgaaagaaaaaattgcggtttttttgcgcttctcacaagaatgttgatgataaaatatgacatatatagaattatgaagggagggatttgcaaacgtgacaggtgtcatatcttcttcttccatcggagaaaagattaacgaatggtatatgtacatacgccgatttagcatacccgatgcagaatatttgcgacgagaaatcaagcaagagctggatcaaatggaagaagatcaagaccttcatttgtactattcactgatggagtttcggcacaacctgatgcttgagtaccttgaaccgttagaaaaaatgagaattgaggaacagccgagactgtctgatctgctgcttgagattgataaaaaacaggctcgtttaactggtctgcttgagtactattttaatttcttcagaggcatgtatgagctggatcgccgtgaatatgtattagccattcaattctttaaaaaagctgagagcaagctggtttttgtgaaagataaaatcgataaagctgaattctttttcaaaatgtcagaagtctattattatatgaaacaaacttatgtctccatggactatgcacgtcaagcattcgaaatatacagtgaacagactacatatgatatcagaatgattcaatgccagtccttattcggagccaactttttggatttaaaacaatacgaaaaagcaattgcccattttcaaaaagcctttacacttgcaaaaacagagcagaagccccaattaatgggaagaacactttataacatagcactctgcaagcaaaaccaaaacagttttgaatcagcgatagagtatgtaaaaaaatctattcaagtatttgaaggatctaaaatgctcccttcactgccacaagcttttttcctaattacacaaatttattttaaattaggtaagattgataacgcctgtgaatatcataaaaaaggaaaagagtattctgcagctgcgggagataccgtgtatctaacggagtttgaatttttggaatctttatacttgtctggaccggatgaggaacggatagaaaaatgttttgtttttcttgaaagtaaaatgatgtatgcagatattgaggacttcgcacttgatgttgctaaatattatcatcaacaggaaaattacaaaaaagcatctcattactttttaaaggttgaagaagcaagacagcacattcaagggggggtgaatttatatgaaatggaagtataaattattactcgcttgtttagctgtgagtgctgtatttatcacagtcgaagtatcaaattcatcaacagaacattttgatgttgcgcaacgcgccatgatctaaaccgccgtccatcggcggtttttttgtcccctctttacccaatctcccaattcatgctgtgatttttttcaataatcttgaagagagtggaaatgcagcatgtctctgtaaagtgtgagaacccactttacacagtggaatcgagaaaatgatgtgacggagttcgaaacgtcgagcgcgacagtgttgaacagacagctgagacgatcggcgtaagcccgactagaatcgccaagaccctgtccttcagaggggaaggagatcaggcgattctgattgtggcagccggcgatgccaagattaataacaaaaagttcaggcaaacatttggctttaaagcaagaatgctctctcctaatgaggtactggagcagacaggccatgaaattggaggtgtttgcccatttgggttggctcatgatcttgaggtttatctagatgtatcgctgaaacggttttagactgttttcctcgcatgcggcagcagaaactccgctattgaggagaattatccgaattttctttctcaaaagcatggattgatgtttgtaaagactaggaataaaaaacatccagacatcgtctggatgtttacttatttcacaaacccaagcagcatttcacggatgattttgctggctgtgtttgccgtttgctctgagtggtcatacaccggtgcgacttccactaaatcagcgccctttacgtttacctctgaacgcgcaatttcatggaccgatgcaagcagttctttagacgtgatgccgccggcgtcaaccgttcctgtacccggtgcgtgtgcagggtctaatacgtcaatgtcaattgtgacataaaccggacggcccgccagcttcggaagcacctctttcagcggttcaagcacctcaaattttgagatgtgcatgccgttttccttcgcccattcaaactcttctttcatgccggaacggattccgaatgaatacacattgtgcggtccgatcaattctgccgccttacggatcggcgtggagtgagaaagcggttctccctcataatcaacacgaagatctgtatgtgcgtcaaaatggataatcgcaaggtctgggtatttcttgtacatcgctttaatgacaggccatgacacgaggtgctccccgcccatacccattgggaacttccctttttctaaaatgctgtccacgtactcttcaatcatatccaggcttcgctgcggatttccgaacggcagcggaatgtcgccggcgtcaaagaagttcaagtcagccagatcgcggtctaaatatgggctgtattcctcaaggccgattgacacctcacggattctgcttggaccaaagcgtgagcccgggcgatagctgactgtccagtccatcggcatgccgtaaagaatggcatccgcctcttcccactcgggacggctcgcgataaatacttttcctgaataagcttcatcaaatctcatcgataataccctcgctttcctgtaaaaaagcgcaagattcgctcctgcgccataccttcattatttaatcaggtcactcacaaatttcggcagaacaaatgccgctttatgaatatcttttgtgtaatatttcgtctcaatatcgaagaaacggctgtcttccactgcaagcggatcatattttttcgagccaattgtaaatgtccacaaaccgctcggatatgtcggaatgttcgccgtatacagcttcgtaatcgggaagatttccttcacgtcgcgctgtacatttgtgattaattccggtgtaaaccatgggttgtccgtctgtgcgacaaaaatgccgtcttctttcagcgctttagcgattcctgcgtagaatccttttgtaaacaggtttacagccggtccgactggttcagtcgaatctaccatgattacgtcatattgattttcagattttgcaatgtgcataaatccgtcatctacctgcacgtcaacgcgcggatcatccagtttgcctgcgatagaaggaaggaactttttagagtattcgatcaccttgccgtcaatatctacaagtgtcgcttttttcacgcttgggtgcttcaggatttctctgataacgccgccgtcaccaccgccgactacgagaacgtgctccggatttgggtgcgtgaataatgggacatgcgccaccatttcgtgataaacgaattcgtctttttcagatgtcatcaccatgccgtctaaaaacagcatgttgccgaactcttctgtttccaccatttctaaatgctgaaactccgtttgttctgtatgtaacgttttgttaaccttcatcgtaatgccaaagtttttcgtctgcttctctgtgtaccaaagttcgctcaattgtcatctccctttcgaggctgtattcatttattgtaagcgtcttatcagcttttattctcggttgaaatctcattttcacctaaggaaaaagtatagaggatgccggggaaaaagtaaagatgcgtcctgttctgcgatgtttaaaaacgatctttttttctcataatagtagaaacataaaaaaaggggggaacccgttgtggatgcaatgacaaataaacggctgagactgacgctgaaaaccgttcgcgcctttatctttttaggggcttttgcggccttggcggcagctgccgtgtttatgactgtcattttgatagccaaataccagggcgctccctcggtgcaagtgccgcaatccacgattttgtatgcgagtgacggctcaaagctcggggaaacgaactacggcgaaaagcgctattgggtccccttaaaggacatgaatccgacgatcgtaaaagcgacagtggcgattgaagaccagaatttctacgatcatcacggctttgattataaacgcatggccggcgcggcgcttgctgacctgaaagcatttgccaaggttcagggtgcaagcaccatcacccagcaatatgcgagaaacttataccttgaacacgacaaaacgtggaaacggaaatggaatgaggcgttctacacgatccgtctggaacaaaactattctaaggacgagatattagaaggctatttaaatacgatttactacggacacggcgcctacggcattgaagcagcttcccgcctatatttcggcaagcatgccaaaaacctaaccgatgcggaggcggcgcttttggcaggtatcccgaaaggcccttccggctattcaccgtatgtcaatgagacgaaggccaaggaacgccagaaaacgattgtgcggatgatggaaaagcagcagatgatcagccaaaagaaagcggatgaattgatcaaggaacctctttcctatcagcctttgaataagcaagtttccaagagaaaggctccttatttctacgacaatgcgatgagagagctggagaaaaagctcggcatgacacgggagcaaattgaaacgagcgggttaaacgtctatacaacggtagataaacggatgcagcgcatcgccgaggagaccattaccgaaacggttaacgcgggctctgacattcaagtcgggttttcagccattgatccccgcaccggaaacgttctcgcccttgtcggcggcaggaattatcaaaaaagcccgtttgaccggacgacacaggcgaagcgccagcctgcttcgacgatcaagccgttgctgtactataaagcgattcagagtggatttacgccagtcactttaatgaaaagcgaagaaaccgagtttcaaattgatgcaaagggagaaacctattctccaagcaactataacggatactacgccaacaagccgattacgcttctgcaggcgctggcgctttccgacaatatttacgctgtgaaaacgcatctttttctcggcacgaacaaacttgtaaagacggcaaaggaattcggcattaccgcccatcttcaagcactgccgtctctggcactcggcaccgaacccgtgcgtccgattgagatggtcaacgcctatgccatgctcgcaaatggcggaaagaaaatcgaaccgacttttatttcaagggtaacggacgcagccggccacgtgctgtacgaaaacccgaatcagcataaacaggtgcttgatgaaaaagccgcttttgtcacagcgagtatgatgacaggcatgtttgataccgatttaaatggatatacgtcggttacgggacgaacgatagccaaccgcctgacaagaacgtatgccggaaaatcaggaaccaccagcgcagacagctggatgatcggcttcaatccgaagctggccgcaggtgtttggaccggctatgacaaaaacagcaccatcgactcggtcgaagaaaaaagctatgctaaaaccatttgggcggacttcatggaggacgcgctcaaaggcgaaccggaaaccgcgttcaagccgccaaaaggcgtaaccggtgtgtacattgatccggaaacaggctactcatcaggtcccggctgtgccgctaagcattacacatattttgtgaaagggacagaacccgcaaacgtgtgctacggggcagaacccgcaaaacaaacaaaagaccggcttccatccaaagaaaagcccgcttccgagaaaaagtggtgggacaaatggctggggcgacatcattgaaaataacccggctcctcggaggccgggttattcgtatggttccttcataatcgatggaagaatgttagacaatcgagctgaacaatcagttttgggataaagtggtgaatttctcatttcttcggcgctggctttcatctcccagtcgccgactcatatccccctaaaaatgaaaaaccccgagtcttgtttcggctcgggattttccatgtcctatttctgtatcaccagtttactcaatgtttacgaaaaatatctcaaatactttaaaagttcacagaaaattcataaattaattgttttccggaagcaggcttgtttttaattcatctgatgaacggtcccataggccctgatcatgctttttcagaaattcgcctagtacacgcttcgagctgtcgtccattttatcaacgatgattttccgtttcatggatttatccatcaaattcacatgctcaggcagcgacttgtagcctcttctgatgcttctgtcgaccgtcatttcacaggctgtcacaccagcgtaataaggcccctcttcttttctgtcaatcgttacccacacaagccagtatggttttccgttcggcacttcttctttattcgggagaaatttaattcctttttcaacggtgctgcgggcatgcatggcgccgatgtctacgaacgcttctttttcttctacatcaacgaatacgggagaaatgttatcaaggctgagtgcccctacgccaaaaccgccgtgtccgtctgtcggatcacttttgataatattaaacccgattgattttttctttttttcttccatgaagttctacctcctacaaaagcggttgaaatatcgctgaaaacagctttaaaatcgaatctcttcctgcattgagcatcggccacagcacgtaagatcctagcggtgtcacaaacagcaccaaaaatacgataaagccgtagctctccgcctgcgtcattttggtacgcatgcccggcggaacgagatcttctataattcgatagccatcgagcggaggaagcggcagcagattaaataaaaacaagacaagattcagctgtatccaaatggaaaaaaactgatccagccccgtgctgaacgccgcaagcatttccattccgtacgcatgcatcaacactaacaaaaagaaaccgataaacgcaagaatcaggttactgacgggcccggctatagatacgagcacaccggcaagccggggtttcttaaagaagcggcgattcacgggaatggggcgcgcccacccgaagccggccaccaaaatcaaaatggttccgaacggatcaaggtgtttaatgggattcagcgtcagtcttccttgttttttcgccgtatcgtcaccgaatttgtatgcgacataagcgtgggcaagctcgtgcatcgtaaacgacacaattagcgtgatgacgaggtatggcattaaagataacggataatataaaaaacggtccaagtgagatatccctctttctcaaaatgcaagaatttactttattcagtatactataagaagcctctttttctaaagagaggaaacgagataaaggaggattcagcacccatgccatacgtaactgtcaaaatgctcgaaggccgtacagacgagcaaaaacgcaatcttgtcgagaaagtaacagaagccgtaaaggaaacaaccggtgcttctgaagaaaaaattgttgtctttatagaagaaatgagaaaagaccattatgccgtcgcaggcaaacgcctgagcgatatggaataatctctataaagccggcgcttcgcgcaccggcttttattatccctattgagccagcttcgcaataatcgccaagaacgtctttttctcttcggctgttaaacgttcaaacatgccatcaatcagctgctggcggttttcgatcatttgttcagccgctccccggcccgcttcagaaagcgtaatccatacagtgcggcggtcattgttatttctcgatctctcaataaacccttcctgctctaaatgattcagagctgtggtcgtggcagagggagacagtgtgacctccttcaaaatatcctttatggtgcagctcccatgtctgtatatgatccgcagaataaatcctcttacattattcacgtgtttcggaacggtggcttcatctaattgcttcgtgcttttcaaatattttgtaagtgcgtgatccagcaaatttgcttccagtttgtcatggtccatgtcaatttccccatttcgagatgcattcataacatacgaacgatatgatttacttattattttactgattccgaatagggaaagtcaaaaaagcaaaatgtgaattcacagcttttatcctacatgcctcgattttccacctgtttgacaagcttatctttaaatgtctgaaaaggaacatgttcattctgctgatgtccgaatcggcggacgtttaccgcattctcctgctcctcatgatctccaagcaccagcacgtacgggattttctgcacctgcgattctctgattttatagccgagcttctcattgcgctcatcaatgccggctcttatccctgcctgcttcagctccgcctgcacctttctgcaatagtctaagtgaacgtgcgaaaccggtatgatttgaacctggagcggtgcgagccagactgggaaagccccgccgtaatgctcgatcaaaataccgaagaaacggtcgatcgagccgaaaaccgctctgtggatgacaacgggacgaaccttttcattgtgttcgttgatatatgttaaatcaaatttttccggcatttgaaaatcaagctgaattgtcgcacattggtggctccgtttcagggcatcttttatgtggaaatcaattttcggcccgtaaaacgccccatcaccttcattgatctcataagagaggccaagctcctcaaggacgcgtgctaaggcacgttccgacgcttcccaaaggctgtcatcgcctaatgaatcctccgggcgagtcgaaagctcaactgaatactcgaaaccaaatgtccgatatacctcatcaatcagccgaatcgcttctttgatctcactctcaatctgatcctcccgaacgaaaatatgggcgtcatcctgacagaacgtccgaacgcgaagcattccgtttaaagcgccgctgtattcatggcgatgcacctgtccgaattccgccatgcgaatcggcagatcccgataagaatacaggctgtttttaaagatgagcatgtggccggggcaattcatcggcttcattgcgaatcttgtatcatccacttctgaaaagtacatattgtcgcgataatggtcccaatggcctgactgctcccataaccgctgattcatcataaacggcgtacgcacctcatcgtagccggcatttgtttgcagctcacgcgagaagcgctccagctcattgcggacaatctgccctttcggcaaataaaacggcatccccggcgcttcttcagaaaacataaacagccctaactgtttgccgagcttgcgatggtctcgttttgccgcttcttccagcatatgcaggtgcgcatccaaatcttttttcttttgaaacgcaaccccgtacacccgctgcaggacttcatttttactgtctccgcgccaataagcgcctgatactcttgtcagtttgaacgccttgatcatccctgtagaaggaagatgcggcccgcggcacaggtcaacgaattccccttgctggtacagtgtgatatcctccccgcgcggaatatcctttaaaatctcaagcttgagccgctcgtctttttgtgcaaacagctcttcagcttcttcgtaagaaacctctatacgtttgatttcaaggttctcatttattatgtttttcatttctttttcgatggcccctaagtctcctgatgccaagcttttccccagcttcatgtcatagtagaagccgtctagaatcacaggccctacccccaatgacacttcgccgtacagccgttttactgcttgggccagcacgtgcgctgttgtgtggcgaagcacctgcaagccttcttgtgaatcgagtgtgacaatcgaaagctcagcatcctcctccagcttgaaactgagatcaacaagcttgccgttgacctgacctgcggccgccttcttttgcagactggaactgatagaaccagccgcttctttgattgtgatgcctttcggatattcctggatctgtccgtccggaagctgaatgtgtacatttttactcattttaaaacactccttattcattgttgtatataaaaaaacacacccgtcccgcagatagggacgagtgtgtgattaacccgtggttccacccaagttcccgacaaatactatattgtcggctcggtgctgtaacgcagcatagacggcattggatacttcagttccccaatgctgctccaaggcggtaaatgatattcctaagctgggaagctctcacctttccttccctctctgaaaaccgtaactatcattcgtgtccttttcaacgcatttatgtagttcatataaaaaaacacacccatccctctaaaagggacgaatgtgttgatcatccgtggttccacccaaattcccgatcaattacacatggtgatcggcttaaagatgctgtaacgcagcatgacggtatcagatacttgttttccccgatacggctcaaaggcggtaagctgctttccctgcgttaggaagatctcagctgtccttccctctctggaaaccgtaaaaagcatctcgtgtccttatcagtgcctgttgtttcaataattttttacatcttactatatattcccacaaagtgcaatcagtgatttacattttttctgacgcggcagtcccgttatgggcagccagaaacagccatacaagcaatgcagcgaggctgtatgcagcccccatcatcaaaaatgtaaacccggcaccggcataccaagtggcggacagatgaatgatcaccccggttatcgctacgccgaccaaggctccgatttgccggtttgcatttaacgccgcaccggcgatattcgcatgtctttgcccggcagcctgcatgatcacagttgtcatggcaggaactgtaataccggtacagaggttcataacagacatcaacaccgccagctgccaataaggaaaatccggagaaatcagcacaaacaacagcaatgcaatgatacagctgaccgccattgatacaaacataagctgcccggcttcaaatcgattcgccagacgggcaaacagcagattgccgaacacgaagaccgccatcatcggcagcagctccactccagccataaaggaacttgcccctcctgcttcctgcaaaaaaaggctgagcataaacatgccgccaaaaagggcgaaattcagcaaaaacccgataaattgggcagctgagaagcggccgtttttgtataaggacgccggcaggatgggtgcttttgcagaaatttcccgcagcaaaaacagcacaaatgccaaaatcgctgcagtaaatactacaagaatcactggcgagcgccagcccgctgaaggcccctgtatcaaagcataggaaagaaacccgagagccatcatgccaagcagatgcccgatgatgttcacgcggctgctttttcccggaacgcggctgaggattcggtaagctgaaatgagcgcagcagcccctattggcacattgatcagaaaaatactctgccagcccgccaactctaccagcacgcccccgataaaaggcccaagggctgaagcggcagaaacaagcgcggcccacagcccaaacattctcgcccgcgcccgctcatcagggtaagaggcagccaaaaggctgagtgagcttggcataaacaaagctgcgccaattccctgtataaggcgtccggcaatcagcatctgtccatttatagatgcagcgcataaacaggaggccagaacaaaaacggctagacccaagatatagatcgtcttcgagccgaaacggtcagccaaggctccgcccgccagcagaagcgacgcaaaagtaagaatgtacccgtccacaacccacgttacacctgaaagtgacattgaaagagtgtttttcatatcagccatcgccacattcacaacggtcacatcaagagttgccatgaggaaaccaagtgcgagcacgatcagcacggatatgcctgttgatgatgttgattcttgtatagacccactatttttcattacaattgccctttcacttgcttgattacccaatcatctattttttcaagatcatacaattccccgactctgtccatgacatgctgcaaggattcttctctcataagattggaccatttatcctcgatttcccccatgactgtctccagcacacagtgactttcaccctcaaatacagattgcagcaggcctttcccctgatacatcgaacctctgccttcgaccgcttgataaacatcataaagcgtaatgtcagccaaaggcttcgtcagggtaaaaccgcccttcgtccctggcaaggattctgccaaaccggcttgaactaatgttctcatcagcttcttcaagtaagacggagacacgcgcaatcgctggcttatagcctctgacgtcaaagaagcctgtacaggcagccttgacagtaacagcagcacagaaaccgcctgctccattcctgatttcattttcatcctattcactcccgattcattatggataactattatccataatgaatctcttagcagcttttgtcaataaaaaaagcaaaagaaacgattcatttcttttgcttagtatggttaacaaatctgcttcagttcctctatgtattgaagcgcttcgtcatattcttcatttgtatatttttgcttgcttttgatggtaaagactttttctttcttttcctcatcctcaagcccgtcaaagtaaaggatcgtggaaaccagctctaaaaaccgtgatgaacggctgtttacactgtcgatatagcctttcatatccggcatgtccagatcagcatggtctaaaaatgcggagcctgtctcagtcagcgaataccggtattgaaagtagccgccctttttttccttcacctcatgcagaaatccaaggttgcacagctcttcaatctggagcgtcagttcctccgaatacggtccataaaagtgaaaatcatatttctcatagaaaggaaactgcattttcttggcgatataaatcattttctgcagcttctttcgcccgatgatttctccagaatccgagaacaccttcatcagttttgcatgttctttcaacaaattcccgacatctcctttttccttctttccaatttctatgtcagtcccagcagctgccggattttcattttcgcttccggatgttcagagccgtcacaaatcaagtcctttggatagtacagcttgtggtccgtccgccgtttacctgagatggattccacaatagccgactgcctggacagctctttaatttggccgttttgcgtcaagagatggatcggcagacgctcctcttcctctcccggtcggtaaaaatcgtatggcagatctgatgaagaatcaacgaccaaataatagctcggatcgattcccgcctctttgaacaatgaagtcagctcaaaataagccgacatttcttcattcggattgaattcaacgtattggaacagctggcggttaatgaatctgcggcacaagtcggataaaatcgcgtcttcttcatcctcccaggcctggaagtaatacaaaataatagattcatccagctttacataatcctccagtgtcaatttcccttcaaaaatagaatagaaatgaaccggagcgtgagtgaagacatagccttcatcgtgcagctgcttcgccctgtgaagaatcttcgttaaaatgacctctgcacttctggtcacaggatggaagtagacctgccagtacatttggtaacggctcatgatatagtcttcgacagcgtgcattccgctttctttaatgacgatctgatcctcgcgcggccgcatcacccgaagaatccgctccatatcaaaatggccgtagctgacgcccgtataatatgcgtcgcgctgcaggtaatccatgcggtctgcgtcaatctgactcgaaatcaggctgaccacttgcttgtttttatatgttttggcaatgacttcagcaacatcctgagggaaacccgggctcacctttctgagcacctgattaacctccgtgtctcccaaaatgatacctcttgtaaaatcctcgtggtcaaggtgaaagaccttttcaaatgaatgcgagaacggcccgtgcccgaggtcatgaagcagcgccgcggccaaacagagttcgcgctcactgtcatcccattcagggcggcctttaaagacgtcatcaaccattcttctgacaatttcatagacaccgagagaatggttgaaccggctgtgctcagccccatggaacgtcaaataggtcgttccgagctgcttaattctgcggagacgctgaaattcacgggttccgatcaaatcccatatcagcttgtcccgaacatgaacatagcggtgcaccggatctttaaacactttttcttctgataattttccatttggatacgccatcgtcattccctcttttttttagccgtgtttctattatatcgactctattctttgaaaacatccttgaatttgcccggcgatttgttccatcttcatgaaaaacacatcttgtgaagcaaaaaagcctgacctgagggccgaggctaagaaaaaatatgtttttacttttttattttcttttttactttgtcaatcagctcatcctctgtcggagctgacagcgggcgattgttcacaaaagcaaatgattttttccgtccgggcccgcaataagattggcatcctacctcaacctttgcgtccgggtccacttctttcaaacgcggcagcaatgttttgatattagtggcttggcaatcatcacacactcgaaattcattagccatgacgtacgcttcccttcatttctatgttcatctatgtgaataacctaaaatcacgtttcaaaaaaaatcacatcactcttcattttacaaggattcgactgttcctgcaagccgctccatccttcgtatctcctattctttcagccaatttgtataaatattttccaacctggacattctaataccatgaaaagaaaaatgggagttgagataaatgacaaaacagcgacaagacgcttggtcagaggaaaacgatctgcttttagccgaaacagtgcttcggcatgtgagggagggcagcactcagctgaacgcctttgaagaagtcggcgataaattaaaccggacatccgcagcctgcggattcagatggaacgcagtggtccgccatcaatatgaaaaagcgcttcagcttgcgaagaaacaacgaaaacagcggatgagagcgctcggaaacgggcagcccgcgaaaaaaagattattatatcagcctcctgccgttgatcctgaaatcattcaagaaaccgctgcagaagagccggttaaaacggaaacaccttctgtcgaaaatgagcaacctttaatgtctggcgaacatatgccttttgttgatgaaagctttaaggaagagttagctagtctatcacacttattgtctcctcaaacgcctgcagctgcgcctgagatgacgatgaatgatgtgatccgcttcctgcagaattacaaaggcaataacgagcaatcatcagcattaaaaatggaaaacgagcgtttaaagaaagaaaatcaggaattgcaaaacaaaacagagcagctagaggcagaagttcaaaagcttgaaaaagaccaaaaaacgatccaagaagattatgaaaccttggtgaaaattatgaacagagccagaaagctagttttatttgaagaagatgaacatgcctctccgtccttcaaaatggaccggaacggcaatttagaaaaattagcggaatgacatagaaaaatcccaaaacgggcagctgttttgggattttcgccatgtgcaaaatccccttttctattgagaaaagagaatttcctcattttgcagccggatcagctattcttgtaaaatgaggccaagcttatgtgaatctattaagacatgtgagctgcctcggccgttttttgtttccgaggcgcagcagaaatgaccaaaagccccagcatcataagcgcaatgcccagccacgaggaaggcgaaagcatttcccctatgaaaaacacgccaagcaatgaagccgtcagcggttcagctaaagacagcgtgaccgccgccgaggccggaaccccggtaagccctttcgcaaacaaaaagtatgcggcacatgttgcaattaacccgatgtaaaggcttgttcccagtcctctaggggtcaatatccacgagatatctaactgccataatagcggcgtcagcaagatggcgctgatcatgaatacaacggcggaggtcgctcgcggaggctgggttttcatcatcgctttactgatgagcgtatagcctgcaaaagaagcacccgctccaagcgccataagaacaccagccacatcaatccgaacattggaactgtcggaaaacagaagccagcaacccgctaaagccagcacagtcgcaatccaccaagagtttcgcgggcgtttcttcaatacagcccattcgagggtcccggcaatgataggcgcactgccgatggcaatcacagttcccactgcaattcccgtttctttaaccgctgtgaaaaacagcggctggtaacacgccatacaaacagcggctaaaaatacgagcggccatgaccaatttttcacgtgaagctcccggctgatccaaaccgcaagcagcatggcgcttcctcctattaataacctgaacgctccaaatgccagcggtgtggcgctttctggagccaacgcctgaacggttcccgtagttccccagaaaaaagccgccatcaatacaaaaaggctgtaaatattccccttcatctgcctctcccctttaatatggatgctgatgtcattttatcgtttttctttttgtcgtggttatctgtatgtaagaaggatttatctgaaaataagattgtggggtaaaatgctgcttgaaataaaaaatgtatgccggcatatacagccggcatgcgaagaacgttcacccaaatacctttgcattccgctcagccatccggacgaggtttttctcaaattccatttcctcatcaatggacagtccagctgaataaagatgggtgcttaacgcttttaattccgtcaataaagcgaacattaagtcttgtacggagatgtctttttgcagaagctcacttaaggacgccatcgtttccggacgtatttccggatagacgccttttttatcgttttgcttgtctttcagcgccgcttgatagaatcgtctgatcaagtcggccctttcactgccgcttttatctgcacagagataaatttgaacagcgactccgccgcgaacgcgtctctgagagatgccggcgaactttttgccatttatactgaggtcatagctgccgggacaataagacccttcaatttcataggcttcgatctttgcgttgtacggtctcagcattcgtctcatcagctcgaccatcgcttcatatcctttgtctatatcgatgcctttcttttcgtcctcgaatatgagagagatatttaaaacaccgtcatccaatacgacggcaagaccgccggaattgcgtacgatcacacggtatccttcgctctccagcaaggagataccatcctgcaaaaacgggaggcgtgtatcctgtattccaaggacaattgtatcgtggtgcacccatgagcgcgctgtcgccggcgacacgccttttccgacggacatgcatagcgtatcatccattgcgaaggattgcttcgcatcaaataaagggccgagactggattggtcaatgactctccatttcggctgcatcagtaaatcaatcggttggtttgccatctatgtaaaaccctttcatgttaggcttattgaacgaaaactattatatcatttcagcagctgtgattgataattgcttttcagcatcgtaataaaaatttctttattttttgtattctccatgagaggagaatgaatgtaagacagcttgcgctttaacgagaaattattaatatgcagaattgaaatttcgcggtggatcaaatccttacgcagcacgcttctggatagaaccgaaagtcccatgccgttaatcaccgcttcctttacaccttgattgctgctgatggtaaacattgatttcggccgaagtccatttgaactgagtacatgatcgagatattctctcgtcccggagcctttctctcttgtcacccacgcttcgttctgcaaatcgctgatcgaaatctctttccgcccggcgagcggatgctgatttggagcggcaatgcacatttcatcctccatgaacggttcaatttccagctcattctcgtttgtatgtccttcaatcagcccgatatcagcctgaagcatacgcacacgctcgctgacctcctctgtattgccaatcatgacatcgaggttcagctctggatacagcttttgcagctgggccaatagcggcggaagaatatactcaccaattgtaaagcttgcagctattttcaattcgcccttcacatagtgatgatgcgcatagatttcagccttggcttgttcgtagagaaacaccatttgctttgctctttgatataaaatgtctcctgtcggcgttgtcgtaaagtgttttggcgacctgttcagaagagccgtttgaaattctttctcaagatttttgatatgcagactgacgctgggctgggagatcatcagcttttctgccgcttttgtgaagtttttttcttctaccaccgctataaacgttttcagcacgtcgtaatacaaaaaccccacccctgtcattaatgaaatatatggttatgattagttttctttattgtactcatatcatccgtcttggtaaagaaggctatacagaagcgcaaaaaaggcagccctcggtcgagagctgccatcgtcttcatttttattacagtgcttgcgccgctgtaattaatgcgagattgtaaacatcttcagcgttacatcctcttgaaaggtcgtttacaggcatatttaaaccttgcaggattggtcctacagcttcaaagttgcccaaacgctgagcgattttatagccgatgtttcctgcttcaaggcttgggaatacgaatacgttagcgtcccctttgatctcggaatccggcgcttttttctcagctacagatggaacaaatgcagcatcgaattggaattcgccgtcaagtgtcagttcaggcgctttttctttcgcgattttcactgcatccgctactttttctgtttcatcagattttgctgagccttttgtagagaagctgagcattgccacgcgaggctcaatgtcgaacatttttgccgtattggcactttcgatcgcaatctcggcaaggtcttggctgtcaggcgcaatgttgatcgcgcaatctgcgaatacgtattgctcttccccgcgagccatgatgaacacgcctgaagtctttttcacgccttcttttgttttgatgatttgaagagccgggcgtacagtgtcagctgtcgagtgagcagctccgcttacaagtccgtctgcaaggcctttatacaccagcattgtaccgaagtagttctcgtctaataacgctttgcgagcctgttcttctgtcgctttgcctttgcggcgttctacaaatgcttgtacaaggtcttccatgccttcatatgtatgaggatcataaatcttaacgccgtccagcgtaaggttcaattcttttgcttttgcttggatctcattttcattgccgatcacaatcggattcagcactttgtttcctgcaagcttgctgaccgcttctaaaatacgctcgtctaagccttcaggaaatacaattttaacgtcttttccagctactttttcttgcactgttgaaaataaatctgccacaataaaacctcctcaaaaagttacaaaaacgctttcttttactagcatactcttcttccaatcaaattcaaacagccaactttcattatagcgctttcataaaaaaatcttatttttctaactaatttaagtgactcaatcttcccttataggttcttctattttgatggagttatacggaagggatgttcaaggtttctccacagtagaatcggataaactatggtatagtgaaggcaatcatgaaaagataatgggagtgaagataaatgagtgaacagcaaatgacgaatgaagctgcaaaaacgcttgacggctggtatgcgcttcatgatttccgcacaatggattggacttcctggaagctgctgtccagtgatgagcgccaatctatcatacatgaattcaccgggttgcttgaaaaatggggcgtagcccaaaaagaaggaaaaggatcgcaaactctttacagcatcgtcggccaaaaagctgattttatgctgatgatccttcgtcctacaatggaagaattaaatcaaattgagcttgaattcaacaaatcaagacttgctgagttcaccattccggcatactcctacgtatcagtggtagagctgagcaactacttggcaagcggtgacggcgatccttatgaaaatccgcatgtgcgcgctcgcctttaccctgaactgccggaatcaaaatatgtatgcttctatccaatggataaaagaagatccggcaatgacaactggtatatgctttcaatggaagaacgcagaaacttgatgagaagccacggtttaatcggccgcagctatgcgggcaaagtcaaacagatcatcaccggctctgtcggctttgacgattacgagtggggcgttacattatttagcgatgatgtccttcaattcaagaagctagtgtacgaaatgcgttttgacgaagtcagcgctcgctatggcgaatttggttcattctttgtcggcaatcacctttcgcttgatacacttcctcaattcctatatgtataatatcccctcccgccctatccggcgggagtttttcaatcctcctttatcagaatttaaataaaatttgctattttcttcgttttttcttacgatgtagataataatccaattttttcaaaggggtgcagttatttgtcaaaacgaaccgcatttgttatgggagccagtcaagggatcgggaaagcaatcgctctgaaattagcagaccagcatttttccctcgtcattaattcgcgaaatttggataatattgaatctgtcaaagaagacattttggccaagcatcctgaggcgagcgtcattgtccttgcgggcgatatgtctgaccagcatacgagagcgggcatttttcaggaaatcgaatctcaatgcggacggcttgatgttctgattaataatatcccgggcggcgcgcctgatacatttgataactgcaatatagacgatatgacggccacgttcactcaaaagaccgttgcctatattgacgctatcaagcgtgcttcctcactgatgaaacaaaacgagtttggcagaatcatcaacattgtcggaaatctatggaaagaacccggcgccaacatgttcacaaacagtatgatgaatgccgctttaattaacgccagtaaaaatatttccatccagcttgctcctcacaacattactgtcaactgtctgaatcctggttttatcgctacagaccgttatcatcaatttgtggaaaatgtgatgaaaaagaacagcatatccaaacagaaagcagaggaacagattgcttccgggattccgatgaaacgggtcggatcagccgaagaaaccgcagcgctcgccgcgtttcttgcctctgaggaagcctcctacatcacgggacagcaaatttccgctgatggcggcagcatgaaaagcatataaaaacatcccgctttttagcgggatgtttcttgtaatgacccgaacggcaggttcagcttttgaatccgcgtgacaaattcccgcagatcctcctgcttcgacaccattgagattctgacatgcctttttccgttgcttccaaaaatttcgcccggtgtgactacgacatgggcatgctccagcaagtaatcggaaaattggtgagatgtctcaaacgtattcggaatttcagcccatacgtaaaaggttccttttggcttttccatcttccagcccaattccttttcgcaaagcgccgtaaaaaagtcaattcgttccttataaattcgtttcaacgattccgtatgctccggatctccagaaagcgccgcactcgctgcctgctgcagcccgccgaacatgccgacaaatacatgatcctgaaattcattgacggcctgaatgatcttttcgttcccaaccgcaaacgccattctccagccggccatgttaaatgtttttgaaaatgaataaagctctgctccgacaattttggcatcctctgcctcaagaaaactggccggtttttgatcgaattcaaacgctccgtatgcaaaatcatgaatcaaatggatgttatgctctttcgcaaaagcagcagctcttgcataaaaagccgcatcagccacagctccagtggggttgttcgggtagtttaaaaacataagcttcgctttttccagcacggctggatcaatcttttcaaaatccggcagatagccattttcttcatacagcggcatttcgtaaagctcagctcgcgccatcgtaatccctgataaatattcaggatagcctggattcgggactaaagcgatgtctcccggattgagcaggcattgtgtcagcacatacaatccggctttcccgcctccgaaaagcgcgacttccgtttcaggattgattgtcactccgtattcccttttatagaaagcagcgatcgcttcctttaaaaaaggatagcccctgaaagggccgtatccatgaaacgaaggattcagagaagcctcccgcaaagcctccacaatatgcggcggagtgggaaggtcagggttcccctgtccgagattaatgatatgggcccccgttttttccaattcctttaccttttgaaaaacgagagaaaactcctgccttggaagtgtcttgatgacatcggacggtgttatttccatctaaaagactcctttttgctccgttttgttatcccgttccaaaaacgatttgttgacgagcttcgtatgcagaaacaaaccgcatacgatcacgacaatcagccccataatgaccggagcgcttaggatgttaatgaacattgaaccaatagaaatgcataatccgatagacgcttcggccactgaaaaaatgcgcccttgaatctggtttgccgcattttcctgaaccttcacttttgcaagcacttccccgtattccatcgcgatgaaaaagaggatcgccgcgatgacagaaacagcgaaaatcggcgtgaataaaaacagcgccagtgagacaatggataaaacggtaaagtacgtcaggcctctattgttgttaaagccccatttgctgacaagcaccgctccgataaagccgccgaagccgatgcagaacgtgagaataaagttgccgatttccccgtcacccagaaagcggctgacaatcggaaaatagctgtacacaactccccacagcaaagccattgtaatcatcgtaaacatggcgtttaatacgaatgcattggttttgatttccttgagtccttccttaaaagactgaaaggcctctttaatgttttcagattgaatcggcacaaattgcagcttgatacggctgataaaaaatgccgaaaccaggtatgtcaaaccgttaaaggcaacagccagctctacagatccacctaacagaaagagccctccggcagccgccccgacgataatggagatggttgtcgcttttgcaaataacgtgttgatgcttttaatatctgattccaaggacgacatgacagcgagacgggcgggattaaaaaacacgccgcttccataagaaataaacagcagggccagaaaaatcagcggatactcgccttttggaagaaatgtgagccccaaaaagatgatgcctctgatgatatccgtccacagcatgatcttaattctgtctaaccggtcgaccagaacccccaaaaacggctgaaacaccatcggaatgcttctgaccacgatgaccccggacgtcacccaataatcgtgataatatgtagacaaaatgagcagggcagggagaacacaatagtctcccatgaacgatagcgcctgcccgtaaagcaagtatttagagttgggtttcagctgtttcatactggcagcacatactttgccgtcagctttgcatgctgctgaatttgtctgattgattcagccacatcctgtgaattactgcctttcagttcaaatgcagcaatggaattgaaagcttcaaacaatgtcaaatcaattgaagtgcctggtgctgcggccgaaaaagaaacgatttcagtatccccttttaaaagcccgtccggaatatcgatcgcttcaatgaccaaatcctcagcggtttctggaatctggccattttgtttgaaatgctgcgggtacaaatggcagtcggcgacatagtaaggctcttgatccaataatccgtccggcagatcggcatcttttccgaaacagaggacatctaataataattgcgccatatcaaggccgaaaacctttttaatgttagggatcatattccagccggcaaatctggctgccgattcaattaaacccggttctctgtttttcattagcttgacctctgtatgtgttgcgcaattttgcaggccaagcccttcatttgcctttttggcagcttcgacaattttcttttttgcctcttcatccagaatggacggcgtaatgtgggatgtctctgtaaacccgatttgcggcgttttatcatgaatggcgatcgggaaatactcaccgtcagccatgatgccttctatactgatatagtcggagtacccttctgtttgataccagtctccgtactcaccctgtaaaaattcttcagcgataaacggcgcttcaaacgtaaccgcctttggcacgttaattgatttcagatagtcattgactctgttaaattcatcttctgccgtctcagtgtccgtaatcagcgttacaccgatagaactcgctaagtatgtaggctttaagataagaggtgtgccgatctcttcaagagcagcacggaaatcttcaagagttgtgactcgtttgtttttgatcgatttgactccggccttattaaaagcgtccctcattttatttttatctctggcattttcggctgcctgcacgccggcacctctcaagcccagacgttcacaggctttcgccatcggagcaatgaataattcattgtttgttgtgatggcatccgccccaaacatttcggcaaccttgacgatttgctcgacgacctcttcctcaggcttgttatgatcctcatgcgcccaataaatggagtcaggatgctcaaaatcagctaaactcttaaaatagtctttatcttttacgaccgcgaccgagtatttttcaatcaatgctgcatgggaggctgtaattgcaaaaggtcttggaataaagctgaccaggttatatttttcagcagcgcttttataaaacatgtgcggcgggcagcctccaagatcagcgatgaccaatactgtttttctctccatatgtaaaacactccttctctattgtgcggtgtatcctccgtctgcggtgatggcgcttccggtcatatagcttgataaatccgaggctaaaaacagcatcacgtttgcgatttcttcaggtttcccaagcctcagcagcggatttaccttcgccttttcttttttgatctcttcaagtgtgccttcattattttcaaggaatgatttttcattcagcggtgtgtcgatgatccccgggcatacgcagttcacgcgaatgtgatgcttcgcataatcaacggccattgatttagtcagctgcaaaaccccgcctttgctggcgttataagcaggaatatcaggccatgccacgagtccgccgacagagcacgtattaatgatgttgcccttgccggcggccagcatatgcttgagtgcatgtttgctcattaaaaacatgccggtcaaattgacttgcagcaccttgttccaatcgctgagctccatctcgtgaataggcgccacgatttcgatgcctgcattattaatcaagacatcgagcccgccaaatgtatgaaccgccgattcaactgcgtgctggcaggcagcttcgtctgtgatgtccgtttgcacaaagtgcagcctgtcattattttcttttcgtaccattgcttctccctgcgcttcatcaatatccgccacaaccacattggcctgctggcccaaaaaagcctgaaccgcagcataaccaatgcctgatgcgcctccagttataaggacggttttatcggtgaggttcatgatcattcatccgccttcattttttttgcttttgctctgttgtagcgcggcgggaagaagatattaatcgattttgattctttttccgaacggttgatggcaccgtgatcttcacgaggctcacagaaataggctgtgccgaatttcatctcgactgtgcagccttcgaccgtcatgtcatagccgccgccgatgcagatgcctatttgttcattccgatgtttatggaaaggcatttctccgccatttccagggattttggcaagcataatttctacccaatcctcaacaaagaacgtgacttccatgcccggcagcaggtctcttgttttgaaaatatccaaaaagtagtcctcaggacttgtatatgtttcatcagctttcagccgcttgatatcaatagcaatcacttcttggtctgtgtcgtttcttgccccatgtggcacatgcggcggcgcgatataggcagattccaaggctgtcatttttcttgtcacatctccgacagtcatcatcagctcgccagaaacgaccatgccgatttggacctccttatgctgatggggttcaacattggtatgcggcgggacgtaagacattaatacttcagtatcccctcgtacggttgaatactgcctcactccgttttcccattcaattaatttcggtgtcgggaaataaagctcctgcatatcttctttagttttcatcatcaacgtctccttttccaaataatgaccagctcattggaatgcttttgaatgtttttacaaaggttagcccgtacttttgccgtgcaagctcattggttaaggcaatgtcatacaaaccttcttttacttttcttgcggcttgactggttgaattgactagtttgaaacgaacatctttgcgggtaaaatattttattaaattaataggtgaaggatgtgaaacaataacagatgtatcaagcatatcgtctctgaattcaaaatcaggacgaacagccaggccgtacatcggtgtatcgcacctgaagatctgcaatagctgcaaatccggcctcatgtagaaatgcttaatgccatcgtaagcatgtgggacgatggtatattccagcgggctttggagcgtcctttcgatgcatgattcaaaagtatcatgcaaggacaatttactgttcagcccttgtagaagagtaaaattggaaatgaaatgctttgctgcgtactcactgcttgtcccctcagggccgagcgtgttgactgtaatgagtttggatagtgaatcagttcttttttttgtctgaatgctattatccaatataatcatgagcaccaaccaatcttttaaaattttaagtaaattttatccagcggcaattgaactgtcaatgttttttgaaaatattgataattattcccatacaaacaaaaaaaccctttaaaaagggtttttaattataggaatttagaaactttgtttattgagataaggactgatcggccttctgctcaagcttgccgtactttttatatgcgaatatactgagcacaaatccgaggactgtgatggcggcgcaaatcaatccgacagctgcatagccgtatgccacatatacgggtcccattaaagcagaacctaatgtcacggccagattcgaggcgaggctgtaaaacaccatgacttttccgcgatgacgttctgagcagtcactcaaaatggtgctgagcagcgtcaccgtcaaactttgcattaatccccaaataaataggctgacgattaacagaaacattgacgccggcgcatatggtaaacacgccagcagaacgctgatgacccccagcgcaatcaaaagggagcgcatttttccgatgcggtcggctatctttcctgtaatcacactcatggaaaacccgattccataaatcatgataaataagcccgcagccgtgtttcctccggtaaaaacgtcctgaagataggtgcctaaaaaggaatacataccgtaaaaaccaatcatattacagaaggttatcgtgatataaacaggtacacgagggactttcagcgcatcccggaatgttcctgccggctcttctatttcttccttgccgctgtttttatgttgggcatggcggcgcatttcaaggagaatcagcaggacaactaaaacacccatcagggcgaaaatccaaaacgtccatctccaatgcaggacgccgccgataaatgatccgagcggcactccgaaaatcagcgccagcgaccagcttgaaacgatcagccccatcaccttgccccggtatgtataaggaacacgatcaccgacaactgcgtaagcggtcggaacaaacgctcccgcagccaatcccgaaagcgcccggcctaaaaagaagaaaaaaatattttgagccaaagcgcatatcaccgttcctatgataaagatcataagcccggctaataagctcagttctctggagtatttatcgcctaatggaaccaaaagcggcgcaccgataaaaatcataacgccgtaaatactgatagataatgcaaggacgctgacatctgagctgaaggcttttgctaaatccggcagcagcggtgagattacaagctcttcagatccggccgcaaatacccccatcgttaaagccagtgccaacaataacggaaaatgatgttttgttttgatgtcattgttttgattgctgttcattctttctcaaacacctcttccataatcttcttatcataaagttgtattatagtttagcattgttttttcactatttacaattcgaacgaaatatttataagttttattattttcatttaaatcccattatatatttctatatttcattctaaaaatacatgaggatgtaatgcgtaaaaaaagctctccggcctcccggagagctttttctattgtgcctctgtctgctttttttcaatcgtttcatgatttatacgctttttgatgcttagatgatagtatgcataacagaaaataatgatcggcacaccgcagtataagccaattctttgatccggaatgaaaataaggctgatcaacacgcagccatataaacaaaatccgagaatcgggactagcggataaagcggcgttctgaactccagatcattcacatttccgccttctgcaaggaaacgtctgcgaaagaaaaattgcgacgcacaaatggacatccacgcgacaactgtcaccatgcccgagattgagatacaccataaatacactgtttctgcggccatgacacttgtcagcagcgaacagcctgaaatgcctagcgtaatcagcagggcattcatcggcacgcctttttttgtcagtctggtgagaaaggatggacccatttgatttgatgaaagtgaccacatcatacgcgacgccgcatacaaccccgaattagcaacagataaaatggctgttaagatgacaaagttcatgatatctgccgaaaatgggatgccgatttgatcgagtaccgctacaaatgggctttcaatcacccccgccgttttgtacggaaggatggcaaccaagacgaacatagcgagcacaaagaaaaacagcgtgcgccaaatgacatttcgaatggactttggcagtgttttttccgggctttcactttcccctgccgcaatgccgacaagctccgttccctggaacgagaagttcaccatgaccagcgtaaacataacggccagcaccccattagggaaaagtcctctatcagtcataaagttagacaaaaagggtgtctcctgtccgcctttaaagtcaatcaagccaaacacagcggctccgccaatcacaataaataatatgatcgccgccactttgatgcttgaaaaccaaaattccatttctgcaaagcttctgacagagagcgcattaatcaaaaagatgacgatgccgaacacgaggcaccatatccagatcggaacggagggcagccacctttgcatcaaaatgcctgctgacgtcagctctaaccccactgtattcgcccagctgaaccaatacagccagccaatcataaagcctgtcgacggtcccagaaatttagtggcgtaggcctgaaacgatccggccaccggcatggcaacagccaattctcctaaacaaagcatgacgagatacattaaaaatccgccgatgatataagcggcaatggcgccgagcggtcccgcctggctaatggtaaagccagagcctagaaacagcccagtgccaatcacccctcccaaagcaatcataaacaaatgcctgcttttcatgctgcgctgcaattcatttttatgattctgcatcatccttccccctttggttcttttgccgtgatggtcatccggtagctttgcaaaagatgaacggtggtttgctgtatgaggagaggcaatacatgaaatgtgtacggtttatagactcgttctgtccatttatggccgtcttttccgtacacgcccatattaatggatggaatattcagcttgcgtatgtctttgaacggaatggtcccaatcatattccacccagggaagttcctgataaaagaatcaatttcgccatcggtttcgtgcagtgataaaaaactgccgtctgccaagtaggggaaaaactttttgaagacaaatgtttcgcctgtcgattcagcggttttgtcagccgcttcttttatcacatgctgcaaaagctgatctcttgcgctatcttctttcaaatagttatgcggcaggtaaggaggtgcgtaaaatagaatgacttttgcgccttgatcggggtcaagcttttgaagctcttcgattgcctgaaagcatctcatgcgaagttcaaggtgctcgttggctttgaatgtctgctcgatacactgctcgggatctatcccccggtttctcagcttttctaagtattgctccaggctatacacttgaatgtcccatgataaatgtttctttggcaggttggctctttttgcatattcttcataataatctgataatttttgttctgtctctcggcatgcttcctcagtgacttcaataagcaaatccatcatttcttttgctgttctttcataaataaaacaattgaagtacaagctggtgctgacagccgtttgcacattataggattccttgttatcacgctgatacaaacaggatgggggcagaaccaactccccttcaaccttttctgccagatggatgttattgtggagacggcttgtgatttcagatgaaatgaaatttgggtcaattcctgccagtgtatcgccaacatggacttcacgcccgtaaatgtaaaagcaaggcaacagttttcccgcggctccggtatagatatatcttgtctgatcaccatcgtaaagcggggtaataaaatccgtattaatagcagccaaatagtgaagctgtttttctttttttagccggttcagctctgaaatgctggcaagaatgcccgaatgctggctctcctcatcgggattggccataaacaatacatttcccggcaacgtctcaaggttctccgaaaaatgcaggagattggctaaatgcacggcgatgccgctttgcatatcaacagatcctcttccgaacatccaatcgcctgatttggcatcccgctgaacatcctgatcgaactcatagcggctgaaatactcggccaatttctcacaatcaaaagcgatatcctttaaagggccgaaatcttcaattccaactgtatccagatgggcatggtaaatgactgtatttcggctttctccatgtcctttaataaacgcaaaaatatttttgcgattgtatgggtcattgggaatggcctgttcccacacatgactggggttttcctgaaaataaggatagctcgtgatcacttctttgatgaaatctgcttttgtcccttctccaacggtgccgttcacgctgctgaggctgaccagagatgctgtcagcgcctccactctttcagccggattcatgtgactgatttttgtatactgcataaattgtcctcctgattaaaaagttgaaatcgtgcgatccgctaaagaatcgcacgattttatttctctcaaatcaaaaagcttcggacgttgttttggcttgcatatgaagaattaagtaatcgggaccgcctgcttttgagtctgttccggacatattaaaaccgccgaacggctgatagccgacaattgctccggtacatcctctgttaaaatataggtttccgacatggaaatcctcacgcgcccgttcaatgtgcgcacggtttttcgtcagaagcgcacctgttaatccgtattccgtgttattggcaatctccagcatatgatcgaaatcacgcgctttgcaaatcgcaacaaccgggccgaaaatttcttcctgcatcaagcgggcgttttcatcaacatctgcaaagatcgtcggctgaataaagtagccttttgaatcatcgccttctccgccggccaatagcttgccttcagatttgccgatttcaatgtatttcatcactttgttgtaggatgcttcatgaatcacgggacccatatacgtatcaggatcttctggattgccgacagtcagcgttttggtcagcgccacagctttttccaccacttcatcataaacatcctgatgaatgaccgcgcgggagccagcagaacacttttgtcctgaatatccaaatgctgagtacacgatagaggatgcagcaaggtcaagatcagcgtccttgtcgacaagcactgtgtcttttccgcccatttctgcaattacccgtttgagccatttttggcccggctgcactttggcggctcgctcataaatccggcagccgactgcacgggaacctgtaaatgagacaaaccgtgttttcggatgctcaactaagaaatcaccgatctccgctccatctcccggaatgtaattcagaacgccgtttggcagacccgcttcctccatgacctcgacaaattttgctgccactaccggggctgcgtcagccggttttaagagaatcgtatttcctgtcacaatcgctgccgccgctgttcccgccataatcgcaagcgggaagttaaatggagaaatgacgatgccgacgccaagcgcttcgtaatgatattgattgaactcgccagcacggctcttcaccggagccccttccttgagctttaacatttggcgcgcgtagaactctaaaaagtctatcgcttcagccgtgtccgcatccgcttccttccacggttttcccgcttccttcacaagatagcttgaaaattcatgctttcttctgcgcaaaatagccgctgccttaaagagaatattcgcgcggtgctccggtctttgttttttccaggaatcaaatgcctgcaatgcggcttgcatcgctttttcagcaagctcttgatccgctgtagacgcgtacccaatgatctcttctttatttgccgggttaatggaaatgattttgcggtccgtttcaattttttctccatttatgacaagcggataatgcttgccgagctgagtgtttacaaaggccagtgactccccaaatgcagttttattctttgcttccgtaaaatcggtaaatggttcgtgtgcgtatgtgactgtcatatgtagtccccctcgtgttatgaaatatatcttcgcatatgaataaaaatgcaagaatcatgccattttcttgtcttttgctgaaaaaacttgttgaatcgaacagaaatttgtctaacaggtgatcatctttctctatttccgatcttgaacgcaaatttattttgcgatttttgctctttaggcaaaaaacaaatgcaaaattattttgcggaggcttctcaaattagacccatccgcggaatcgcgatgcttctgccgattttctgatgcccgtcatgtaagccgccaaacgcatatccactttatgtgttgccgctgtctgataaattgtttcgaacgagctgaccatgacgcttctcaatttttctgcaacctcttcttccgaccaataatatccttggttgttttgcacccattcaaaataagaaaccgtgacgccgccggcactcgccaggatatccggcacaagcagcacgcctctttcattcaggatcttagtggcatcaatggttgtcggtccgttcgccgcttcaacgacgattgacgcctgaatgttatgtgcgtttttggctgtgatttgattggagatcgcggcaggcactaaaatatcgcaatccttttcaagcagctcctcatttgtgatgacgtcagtaaataaattggtgaccataccgaagctgtcccgtttatcgagcaaataagggatatcaaggccgtctgggttgtagagcccgccattggcatcagaaatcccgatcaccttcgcgcccgcatcgtgcatgaatttggccaggaagctacccgcgtttccaaagccctgtatgatgatgcgcgcgttttgcagcttgatcccttttttcttcaccgcctcttcaatacaaatcgtgacgccctgtgccgtcgccgtttcccgtccttgcgatcctcccaaaacaagcggtttacctgtaataaagcccggagaatcgaattcccgcagccggctatactcatccatcatccacgccataatctgcgaattggtgtatacatctggagctggaatatcctttgtcggaccgacgatctggctgatggcacggacataccccctgctcagcctttccagttctccaaatgacattgtccgcggatcacaaataataccgcccttcccgccgccgtaaggaagattggcaatcccgcatttgagcgtcatccaaatggataatgcctttacttcctcttcattaacttctggatggaagcgaacgcccccctttgtcggaccgacagcatcattgtgctgtgaccggtagcctgtgaacactttgacgctcccattgtccattttgaccggaatgcggacagtgagcattctctgcggctctttcatgagttcatacatatctcccggataacccagcttccgaagggcttccttaatgattgtttgggtagacagaaataagttaagagcttctttttcttcatctttcgagacttgctttgctgacatctttttcacctcattgtttttttggccggctgtaatgtaaacgctttaaaaaatcagcccgccaattcctttctgcattggattcacccttatcatcatgcaagatccgtaccagcttttgaatccacaaaaaaagagactgaaaacatctcagtctctgactacaaatctatcgattaacggggatcaatcaccagctgcgtttcagcataaaaactgccgattcccaaaccgtttactacatcgcctttaatcgtgtaagtgcctgcgcgaggaagagttttacgcaccatgacaaggtcaaattcggatgcgcctaacaaatcaagcgtaagcggaagtctgactgtttttccatcgtttaaaatctgtgtttctttcagtgttcttccattcactgaatctcttgtcgtagcatgaaacccgtcaggaaattgaaattctaccgctccaagagaaagcaccgcatttggtttatatgtcacttcaatatcagaagtggtccactctttcgtgctgttaactgtttttgcctcgattgatgcagactgtgcatgagcttggcccgaaggaagtaagattgatagtaaaacagctgaactgatgaataatgaagatacgaatgaagttctttttagcatgacatttccccctaattgattgttgaaatttggccagagcgtcctctgcagaaaaagcgctttttcataattcgcgaattaccagttctttttcttaaaaattaatctatcatcattttccatggaagtaaatgttttttaaggaatattaacacttggaattcaatgagaattccttcctgtttatacaaggttcaaatggacgattctcctctctttttctagtaaaatctgcctgacattttatatcttttatcctattttaaaaaagggcaaaaaaagtcgaagatgcctctgctcttcgattgatcacgttcctatttttatctgaattcagtgttccagttaaaaccgatcgtctcatcatcccacggaattcttttttcatcaggctgatccgggttatacgacatggtggtaaaatagataattgtcagcggcgtctctcccagcactctatatccgtgagccaccccttttgggattaataacagcatcgggttgtcttcgcccatataatagacgtccgtttctccttttgtctttgaatcctctcgaagatcgtataggacaacctgagcgtggccggttgggaagaaccagagatcatcctgcttctcatgataatgaaatgccttaatcacacccggatagcttttcgaccaagaggcctgcccaaaatgctcaaggaggttctcatcgtcccggaccagctcagcaaaaaagcctctgtcatcgctatgcttcatcaattttttcaccttgactccatcaatcacacgcactgctcctttcctgcaaatactctcgtaacgcttcccgccagtggcgggggcggatgtcggcttcttcaatagcccgatggctcagcacagagtatgccggacggggcgttttgttcccgtattcctctgtcgttacaggcaaaatggctgtttccagcccgctttcttccataattgccgtcgcaaactcataccagctgcatatgcctgaattgctgacatgatagatgcccggcggatggctgaacagtttgatgaccgcttctgctaaatccttcgtataagtcggcgaaccaatttgatcgctgacaacccgaagctcttgtttcgtttcagcaagcttcagcatggtttcaacgaaattactgccgccatgtccgtacacccacgatgttctgatgatcgtgctgtcttttgtcgttaatcgtatcagttcttctccgagccttttgcttttgccataaatggttttcggatcgaggggatcatcttccctatatggctgggttcctttcccattgaatacatagtccgtgctgatatgaacatattgagctccgatgcgggttgactcaagcgctgtataataagcgccgattccgttaatcaagtacgctttatcaagctctttctcgcattgatcaaccgacgtaaacgcggcgctattgaccacgatatccggctgataatggccaaacgaatgccgtactgagcgctggtcagcaatgttcatcatcttctttgttaacgcaatgacctcatatccggcttgcttcagctggcggcatagttccaagccaagctgtcctcccgccccagtcaccaatacctttgtcaatcagatcaccttctcatcggtcattgtctgtataccactgaatcgtacgcgcaatgccttcttcaaacgtcacttcctgccgccagcccagttcatttttcagcttagatgcattgatcgcatagcgccggtcatgcccttttcggtcttccacgtgggcgaacaattcctcacagcccagatgcttcaaaatggcactcgccagctctttattcgtgcgttcatttccgccgccgatgttatacacctcgccgtcggtccctttttctaaaatcagcttgatcgcgcggcaatgatcctccgcaaacagccagtctcggatctggagtccatcgccatacagcggaacaggcaggccctgcttcgcatgacggataatcgtcggaatcattttttcgctgtgctgataaggtccgtaattgttgctgcatcgtgtaatgatggccggaagcttgtgggttttcacataagacaacacgagcaaatcagagcttgctttgctggctgagtatgggttattaggagaaagcggcgtcgtttctgtaaacgcgggatcatccgcttttaaatccccgtatacctcatctgttgaaatatgaatcagcttcttggcttttcctttcaagaccgcttccgccaatcggtatgtccccatgacatttgtggtgataaacggctctgcttgggaaatgcttctgtccacatgcgattctgctgcgaagtgaatgacgccatcgtaggtctcatcaaacgcgcggtcgatatcctcctgaacgctgatgtccccttttacaaagcgaaaacggctgttttgctttaatttttccatttcctccgggtggctggcgtacgtcagtttatctaaaacggtaatgcgcgcatccgtttccctcagcatgagctttgtaaacgtgagcccgatgaagccggcaccgcctgtaattaaatatgattttgccatcacttttcgtcctgtcctttccgtaaagcctggtgtacaagctgggaagcgagataaagcgattcgtgagttccggcatctacccaccagcctgataacacatcatacgtaagctggctgttttcgatgtatagattattcacatcggtgatttccagctcgccgcgctttgatggtgatatttgttcaatatatgaaaacacctctgcatcatacatataaataccggtaacacaaaggttggtcggtggctgttcgggcttttcgatgatggaacgaatccgcttgtttttctcatcaatctcagcaatcccgaagcgttccgggtcatcaacttctttcagaagcacttttgctcctttcccctgctgttcaaagcgttctgtataaggctttaatgaatcttcaaatatattatcacctaataataaaatgaaagactcttttttcgtaaagcgctttgcataagacagcccatccgaaatgcccgatgctgccggctgtacttgataagtgatagtaacgccaagctcttccccgttcccaagcagtttgtaaaattgcggcatatgctccttttggctgatgagtaaaatgtcttttattccggcttcctccagcttcataatcgaccagtatatcatcggatacgggcctacaggaagcaaatgcttgttgacggctttcgttaagggcataaggcgtgagccgtttcctccggctaaaataacacctttcacattaacacttccttacatgcatttttatatctcttgttcatataaatcttgaagaatagctgttacccgtataatgcctttgccatccacgagcggccttcctcccttgtgcaaagaaaggcgaagaggatagctgctcataatgcgtgacatctgatagatgagtgtttcatccggtacaagctcacccaagccaagatcaagagcggcgccttggtcagcaaatgttttggctgttgccgtttgatgcccaacctgagaaagaacaaggcacggcacgccgatgcaaatggcttcatatagagagatgccgccggcgacaatggctgcgtccgcttgtttcatcaaacccgccatatcatttgtctgttcgatcaccttgtactgcggcttcttttcgatccgccttcggactgcctcttgatgcggtgaagcgctccccatcacaaaaatcatgtttttgtcttttatgccggggacttgatcagcggcagccagcactttaaaaataagctgcttcggatcacttcctcctaatgcaacaaggatattgcggcagtctttcttaagtgtgtaatcctctcttgcggcctgaaaggcggggtgaagaataagatagtccggaccttcataaatgcgtgtgtttccctgaacgtacaccctgcttctgatgtcaccgtaaattccgttaatgactgcgtcactatattgaattgatttaccgtttttctcttcaaaaagaacaattttcgcatctgtctccgtctttattttctttaacagctctgcaggcgcgcctagaatatcaaacaaaagcaaatcaagcttcttgctttttatttcccggagaataaattcgtgctgctgcagctccggctttacgatgacacgccaatgctcttcatgaagaaacgcttcagactcctgattcgtataaaacgtaatcaaacatcgctgtttgagcccctccgcaagtctcttcatccggacaacatggcccattcccttttcatagccgccgtctgcgaagatcccaacacgcatggctattcagcctctcgttcgattgccgcatcggggttccggttcagaagggtgataagctctgaggcggatacaccagggcgctcgcctgctttttgatagagggcctttatcgattcatagtcttcctttgtatcaatggtcagccgatattgaggggcgcgaaatcgttccggcgcctctaaaaactgaacacgataaagagctggatgattccttatatataacgtgacatgctcctgatattgatcctccatattctgaatacggctgatgtcaattaataggttggcgttgaccacttcgccgcaaatccctaatggggcattcaggatatacgtataatccgatccttgatcaaaatgcgccttaatcattacatcgagcagctccggatcgacaaacggattatcacccgttaaccggatgatgactgacggtttaacagcttctatgaccttcacaaacctatcgaggacacgttcttcgctcccgcggaaaacacgaaagccttgtttgatacagtgcgcctctaatatgtcgtcagtttctttgtcagacgtggcgatgacaagattatcccgatccttttggtaaaacgcgcttttccggacacggtgaacgagaatgtcaagtaaacgattcgatccgagcggccgaagcacttttcccggaagccttgttgaacccattcttgcttgaatgataaagagaatatcattcatgaaacgggctgtccttcagtaaaatgtcatcccagacaatgcctgtgtcggctggaatgtctcttacagcccgaacaccgctggtcagcagttcaaaaaatctcgggtgcagcccctgcggcttttgtccgggccgaagcactgcgatattgtcttcactaaaggcttcacctttttgaatcggagctgttgtaaaaatgcctctgtatgcaaaatttctgatttctccttcgatggaggttgttgttttgtatgaactgccaagcagtttttcagagaccggctttgtgatcccctgtttcagctcagcttccgttttcctgatgccatcgaccatttctttcaattcatccggatttaatgcaaacgagtggtcggcacccggcagatctttatcgatcgtaaaatgcttttctatcagttttgctccgagccgaaccgcggcacacggcgcttctgtcggatgctcgctatgatcggagaagccgattactgcctcaggaaaagcggcggcaagcatcggaatgacgctgaggttgctgtactccggcggtgctgggtatttcgccacacaatgcattatggcaatttgattgtttccctctgccctgatggtgcgccaagcttcgtgaacatcagagatttcagctccggctgtcgagaaaatcatcggcctgttcagccgggcgacatatttgagcagcgggagatggttaatttcataggatgcgattttaaaagcgctcggcgaggtagactgaagcagatcagctgacccctcgtcacataccgtacttaaaaagatcacctgcttttcgcggcagtaatccaatagcggtaaaatccactcagcgggcatttccatagattgaaccaaagaaaaaatagagacgtccttgcccgctgccgtcttgtacaaaccaggatctttctggtacatcctatcagcttggaacatttgaaatttcacggcatccgctcccgcttccgccgcggcgtctatcagcgcaaaagcctgatcaagcttcccgtcatgattaatccccgcctcagcaataataaaaacaggagcgtctttgcctacagttttattcgcgatctgaaacgctgccattatttcgcctccttgcccggccaaatatgataatagtaatacgattgttcagcggtgaagcccattcgttcataaaggcggatcgcccttacattgtgaagctgcgtccccgctgttaccgttctatgcttctgggtctccggttgttctatgagattcgccaataaatgaaatgcaatacgttttccttcaaatcccggctttacagccatcaaatcgagaatgcattcatcatctcttgataagccctgaagatagccgatgacctcgccattgtgtttagcgacaatattgaccgccgcccttccattcagattgtttcgtgtccactcctgaaatattttgtttgctgcatcgcggctgagatgaggatcctgaaaatatctgctttttgtaaacgagtctcgggccagctcacatatcgcttctgtgtccccgggctcaggcgggcccagttcaaaaaatggcggtgttttgtcataaaaagacggaggcatcgccagcttcagcaaactcccgacaaagtaagaggatggctgctgctgtatcacatgcgcggctccgatatcttcagccggaacgcggacaaagataaaatccgtttcatccatttggcgtacagtataaaaagcttcaaacagcctctttagctgcccggtactatttgccgcaagaagtttgacgttgatgactttcttctgaagcaccttgctttcccacaaagaatcttcgtaaagcaatacgccttggagcctgctgttttcaaaaaggccgagggaaaattgatacggaacatccagtgtaagctttctgctttggagaaattcctcaattgcctctttggagacattttcttttaccgtatacacttaatcagccccttttacgatatcccgcacagcttcaatgacatcatctacatcgtcgtcagacattgatggatagagcgggagagaaagggttcgtttatagtaattcatggcattcggaaagtccgcttccttatatccaaattgcttttgataatacggatgaatgtgtactggaataaaatgaacgctagtgccgatattgtatttatcctttaaagccgtaatcatttcgctgcgcgtaaccccggcttttttttcatcaacttgcagaacatatagatgccaggcgtgcctgccgtcatcatggacaaacggcgtgatcagcccaggaatctgctgaaaagcggtttgatagcggccggcaatctcttctctccgtttctgcatatcatccagccgtttcagctgatgaagtccgagggccgcctgcaaatcaaacatattcatcttatagccgggcgattcgacttcatagtaccagctgccatttgaagaataacggttccatgcggctttactcatgccgtgaaggcttagcacccggatcttatcggcaagctcctcatcatcagtcgtcagcatgccgccttcccctgtcgcgaggtttttggtggcgtaaaagctgaatgccgttgcatccccgatagaaccgatcattctttgcttataagtcgtatataccgcatgtgccgcatcctccagcacgaataaaccatgattttgggcaacagccaatattgcatccatatcgcaggactgcccgccaaagtggacgggcacaactgctttcgttcgcggtgtgacggccgcctcaagctttaccgggtcaatattgagcgtgttttcgtcaatatccgcaaacacaggcgtcgctcccgtatgaataatcgtattggcggtcgagctgaacgtaagcggagaggtaatgacctcgtccccgggcccgatcccttttgctttcaaagccaaaaataaagctgcggtacatgaattcaccgccacggcgtgcttcgccccgacaaacgcggcaaactctttttcaaactgctgaaccttcgggcctttagaaagccatcccgattcaagcgtttctgtaacctcctgaatttcttccttaccgattaacggcaatgagtaagggagaaaatgatttctcttttgcaccatttctttgcgctcctatcattttattcagtatcttcccgcctgtaatcaacccctgttttggctttcagttccgcaaataaagcatttgttgattctgccaccggataattagccgctatgaatgccaggcgcgcctcttctgctttttgatgcacgtcgggacttcgaagaacttcaaccaaggtgtgcaccagttcatccggctggtcaaacataaaatcgccaagagactcataatacggatacgagcgatttccggacgattttccgatcagcacaggcttttgaaacagcatggcttcaagaccgactgtcgaggtctgcgtcactgcggcatcagcatacggcagcaaatcataaagctccagctcctttttgatgactctgcatgctttatgttttttcgccgcctcgtgatacagatcaagcttgttttttccgatttcccacgggtggggtttgataatgatctgcagctgcttctgatcagaaagcccctgcagcacaccggaataaaagtcttctgaaaagggctgagtggcaatgagcacaatttttttagtcggctgaaaagcaagttttcgatagaatatggacatatccataggcgttctgttaaaaatctgatcgaagcggggatgtcccgttacgagaatctgctcgggtttacagccttttcgtatgaaccactctgcttcatacgcaccaaaaacagcttgataggttgtaaaaacaggaatgaaggcttcatctcccatcaatgcgccatgctgaagacaaatgctgacggccccttttctttgacacatgagagcgagcaccctgctgtaaatgtcttctgccgttccgacaataacagctgaaatcttttcctgttcaaacagcgcatcaactgtatcaatggcctctataaataaaggaatatctttgaaaagccggtcgcgaaacgcttgatcaccaaatgccgggtgatcatcataaggggcgagaagcgaacaggctgtttcgagatactgcttcgaatcgcctttttggcatgaatccgcaatctcccgcttgctaattacaggcagatcacaataatgcggcaaactccatctggccaaaacagccgttttttcaggatcaaattgatagtaatttccgtttgaaaaacgcaggtaatcaaagtgcaaaatgactttccctttaacaggtttgtcatttgttttaacgattttttggattctttcttcaaaaaacggctgaatctgtccctcatcgatatgctgatccaccgatccgaataattccggttcttcttccatcatcaccctcagctcagggctgatgtattgataaaaattactgataagcccaagcggaatccctttgtagcgaagtttgtcaaaaagctccacgtacttccggtacagcacccaataattgcttaaataggccgacaagctctcaccccattccaagcttttttaatgattcacgcagctctcggcaatttcgctgcggaggaaggttcctgacaaattcatttttttctgattcaaacagctgaaagtgaatcgattggtcggtaatataattcaggtccagctcctcatccagtgggtaaaacggataaaaatgattgactctccaaaagaaccgcgcatctcctatacggtaaaacgccgggctttcatcccaataggagccaaacttctcctttaccttctcaagcaccgaatacctgtgcatcaccgagcaatgatcaattgcgcacggtgcgttccatgtcacttgagcggcaggcctgacagtttcttttacaatgtcgcgattctcgtttaaatgataggttttggaggctgagtaaatcacagccttttcaggatgggtatcgagctcccgcaccattttcaggaggcggtccggcatatagatgttgtcatccgtcgcataggtgatatattcaccctccgccatctcaatcgcctgattgatcagtgccgcgtatctcgttttttctgttctttccttcactccagatatatcgctttgataaaaacgcactcggttatcattcaaaaaaggacggattacattcagcgtctcttcattggagttgtcatccataataaacaattcaaaatctgaaaatgtttgtgagagtatgctagaaatggactttgccacataatcgcttttgttatagctcgtcataatgactgatactttaggcaaatcctacacctccttcttggaacttcacacctgaaactatcgttatcttatgttgcttatgctcaagttgcgctagggatacaaaccaatatgcgaaaagtttgtgtatgtctctgaaaaacagcggctgcccagagcgaaatctgatcggtccgctgttctttttcagcataatccaagcatcagcctcataaggtgaaagagataaaaatcgcaccagcgactaagatcgttttccatcggaggtgagtcatcgcggagcgttcacctatacatccagaacatgttttgaatggttttcataaaaaggaggaacgatatgaaaccgaaaaaaaatcaatatcagcaaatgcaggcatttgataatatgcaggggtatcagcctcagtttggcgccaacccgtacccgcagcaaggccaaggctcacaaatgcagccaatggggatgcagccaatgatgccaatgcagcagggacagcaaggacaacaaggacagcagggatttggattcccgggccagcagcagggcggcggttttcaaattccatcggggcctacaccgtcaggaccgggccaaagcgttcccggcatgctgcctgttgaggaatcttacatcgagaatattttgcgcctgaatcggggaaaaacggccaccatttatatgacatttgaaaacagcaaggaatggggctcgaagatttttcgcggcgtcatcgaagctgcgggccgggatcacattattatcagcgacccgaaatcaggaacacgctacctgctcctgacaatctacctcgattacattacatttgatgaagaaattgcttatacgtatccatattccatggcgtcctattcgccaagataagaaaaaagccaatcactcatatgatgaggattggcttttttgattatagatatttgacggctgcgacaacgatcataatccaagaaataataaacgccacaccgccgagcggggtgatcgctccaagaatggagatttgcgtcacacttagaatatataagcttccggaaaacagcacaattcccgcaaacatcagccagccggctgtcgtgacactgcctatgccggataatttatcagccagaaacgcgacaacgaataacccaagggcgtgatacatatgatactgcacgcctgtgtgccaaacctgaagatatttatcaggtattttcccttctaatccgtgagcgccgaatgctccgagtcccacggcaagcagggcgttaatagcccctaatatgataaaaactttcatctatctctcccgccttttcgttaaactcatatcatttatcttatcgcacctgcaccaaaattcaatgtttgttctccgttgacacgagattgtcggattttctcctgcgccaaagctggaactggtcagctgctattgcagcaagcgtccctaatacgagcccgttgcttaatagagaaataaataccggatgcaatccctttaacgcagtttcaggaacaaacatgataccgacccctgtcagcagtgagatgccgatgatagacctcaccctttttgattcttctttctcatacgaatcaaattcggcaaaggccagaccgcccattgcggagaacacaacaaaattcaccgcaaatccaacgggtgacggcaggctcgcaaacgtattcataaaaaacgggatcacgctgattacgataaccagaatactgccgagtataaacggttttttagaaggcatcttggtcgtttcaataaaacctgcggctcccgaaatcggaacaggcgcaatagctcccgtcaaaccgctaagcagatggctgaatgaagctgcaaaaccggcatggcgttcatgatgctttccatcaggctgtttgctgaattttttcacggcgatgtccacgaccttcatgctcgccagcatattcacgatcagcaagatggtaataaaaatagaagtgatgatcaggccgctgttaaataacggtggcccaaaaggaaacagggaaggcagctgaaacagccggtccggcatttcaatcggctttgccgctccggcagccgcaaacagcacccacccgccgaacaaggctaataaaatagaatattgcttaaaaaacacgatgttcgaatttgtcattataaaggcggcagcgatcacaacaagcgccaggccaaatacaagaccgtccaccccgtcctgtcgataaccgattccgagaattccttttataatgggctgactcagctgcatgacaagaagcaataaatagacgcccgttacaaccggagtaaacaattttgcaagtctgtcaatgaccttgaaaacacttaacaaaaagaaacatacagcgcttacaagaagagctccctgcaacccccgcagtgtgtctccatatgtcgcaaacacagttcccgttagccctgcgtagatcgtatacactccccaccacaagccggctgggctttcattgatcggcagtctgtggcctttcaaacactgaatgacggcggcaatccccagtacaaaaaaagtgctttgaatcaatctcgcagaatctgagtgatccagatgaaacgactgggcaaccgccaccggaacaactatcgccgcagcaatgataaacgctgtccattgcaacgcgccaagaaccaatttcacgtaagctcaacctctctctttaaaaatcaaataaagactctccgtttccatcctcttcctgcttctctttttcttgctttcgatatttgtttaatcccgcgctccccatcattttttccatcatcagctggtctgtcgatggcggcgcggcaggacttggcgtaacgctcggctgtatgcggggcgcgctcgcgttctccggctgatcaagcacgacatcacacagagaacggacaaccgctacataacgcttcagctcctcatcccgttcagctgtttttgcttttttcagctcctcttccatcttttgaattaatgcagatatatgaatgttcatgaagcaccctccaaaaaaataaatgttgtcttcctgcattttatcaaattcctgctgtaaacgcagatatgagtttgttattttttctgacaaaccttgcgcgattgacaagcagaagagatttttcacataataaatcaccatacattacaaaaaggagaaacggaatgaacagcatcccctctatcatcagcaagcataaagcctattttgcggcgggacatacgagaccgcttgaatcgagactgaacattttgcgaaagctgaaacaagccgtcagaactcatgaagccgatctcatagccgctctctaccaggatctccacaaatccgagcaagaagcatactcaacagaaatcggaatcgtcttggaggaaatcagctttgtcatgaaacggctgaaaaaatggtccaagccgaaacgagtcaaaacgccgctgactcatctaggctccaaaagcatcatcattcctgagccgtatggaaccgttttggtgattgcaccttggaactatcccttgcagctggcgctttctccgttgattggagccattgcggcggggaacacggtcgttctcaagccatcagaatatacgccggctgtttctgctattctttccaaactcatcagcagcgtttttccgaccgattatgtcgctatggcagaaggcgggcccgatgtcagcacagcattattacagcagccctttgactacattttctttaccggcagcgtagccgtgggaaaagtcgtcatggaggccgccgccaaacaattaattcccgtaaccttggagctcggcggcaaaagcccctgcatcgtccataaagatgctgacattcagcttgccgccaaacgcatcgtcttcgggaaatttacaaatgcgggacaaacctgcatcgcaccggattatttatttgtccacgaggacatcaaaacgaagctcacagaagaaatgaaccgtgcgatcagagaattttacggccctcagccggaacggaatccgcagtacggcaaaatcgtcagtgaacggcactatcagcggctgctcagctttctgaatgacggcatcccactcacaggcggacaatctgatcccaatcatcacaaaattgcgccgaccattctcgaacaagtgagagatgactctccagtgatgcaggaggagattttcgggccgattcttccgctctttacataccgcaatatcggggaagtcattgagaaagtccaatcgcgccctaagccgctcgccctgtatctcttcaccacaaacaaagaaattgagcgcgctgttttaggaaatctgtcgtttggcgggggctgtgtcaatgatacgttaatgcatgttgcgacgccgtatttgccattcggcggcgtcggggaaagcggcatcggcagctatcacgggtttgacagttttaacacattcacgcacaaaaaaagcgtcgtcaaacaaacgaaccgtttcgacttcgcatttcgttatccttcctccaaaaacgggctgcgaatgattcgaaaaatactcaaataaaaaagcgcagataacctgcgctttttacaaatccttaatacaccaatcaatcggcgcctctcccattttctccaaataggcattcgcccgggaaaacggtctgctcccgaaaaatccgtttctcgcagaaaacgggctgggatgcgtcgattcaatgataaaatgcttggacgtgtcgatccgttcttttttcatttgggcatgccgtccccacaaaataaaaataaccggccgctccctttcattcagcacgtcgataatccggtctgtcagtcgctcccagcctttccccttatgggaattcgcctgtccgcgccttactgtcagcacagtattcagcaaaagaacgccttgctttgcccagctcactagcgatccgtgatttgggatgctgcacccgatgtcctgctgcagctcaagaaagatattttttaacgaaggcggctgctttacaccgggcttgacagagaagcttaaaccttgagcctgtcccggcccgtgatacggatcttgacccaaaatgacgaccttgacatcatcatatgatgtataatgcagcgcgttgaaaatatcccggctgtccggataaatcgtttgctccgcgtattccctcttcagcatctctctgagctcttgataatacggtttctcaaactcttcctttagctgattccaccagctgtcttgtaaaagctgtttcaagattcaggcctccttacgaacgatgaagtctggaatagacaggctcgccatcccaaaccatttcactttttgcttcccgcctcttcatctcaggctcttcaagcaggacggcaaagtttttcgtcggcagctccccgagtccgtgcttttcacttaaacgatccaaatattgcttccgcttggcgccaaggtccgcagactgattgtctcccacgtcactgaaggcataaatcacactggcgcaagggacacgcttcacccggtaatccttggctgcgcgcagataaaaatcccaatcccagtaattgtgcacatcagcatcgaaatacccgatttcatcatgcagaaaacgtctgtacatgctgcccgacggcacgtatgtagaaaacactctcatatcctcatagtcagcggtataagcaaacaatttccgtgacactggataccttgttccgtttttctcttcaaacgaaactatttccgcatcagaatgaacgaagtctgccgtttctatttcctttgccattttctcgatatgccctggcgtaaagaaatcatcgtcatcacacagcataatgcaatccccagacgcctcttttacaccggcatttctcgcagccacatgccccgagttcttttctaaattgatgacagcaatcggtagctccggatacagtgctttgaccggcacgaccgattccccggcatcattcacaataataatttcatacggcttcaaggtctggcgggaaatcgactccaaaagctcacacaaagccggaatccgattataggtcacaattacgatagaaatcttcatgatgctctccttctcattttcatagtcatgtactattaaaacatatattggacgggagatcagtgggaatatcctactgaaacggcatactacaatgatagaaacagcaaagtggctccgatcagaagcaccatgatcagcatcagatctccaaagacatgaaagaaatctttcatgcggacgccattcggaaggataagacgccacagcttagattgatagaccggcagcagcaccagtgcataagaaagacacaaaaatgtaaaagccggcggcacaaaagcacagcctgcatcgtcccaattcatcatgatgtctttcatactagatccatccaataaaaacaaagatatcatgagggctagcaacacaaaggaccccaattgaacctcaaacaggcgcattttctggttatatgcaaatcggaccgcccaaaaccagacataagcatatgaacatagcagcgtaagaatggcacctgctgtaaagacgacatcaggcagccgatcaagcagaaaaacaaaaggcaagctggctgccatagccaagagcatgcagccaccagtaaacaaaaatactgccccatgagctacaaaaccatataaacaagagctaatcctcacgacatacacctcctttacatagaaattctatgtatatacctaaaaaatcagacaagctgacgcctgccaatataacagcccattcggccaaataacggaaataacagcgttgcaaaagcacaagttccaacaaaccaaggtgtcaacaaggattgaaacagcgcagcaggaattacattgaatagaaaaacaagcataaaaatgacgtttggcaccattgagatcagaatcgtatgtagaacaagcttttctccgcgttttccaaactccttcacgccttgatacccaatcagcacccagtagatcatatatgcagctaagatcagccaaacagaaacagaaatgcctttccatactgcttgaacaaacggtgattcaagccatacatgcattattgtaatcgcaatgccgacagcgaatagggcactgttacagaaaagatggaacatcaaaaacgcacggaacgttactggctgtattttcttaaacgaagaaacaatgtcagttggtgttccaaacgcctgcaataaagtctgcatagcttcctcctcactctttccttcctgaaaagagcgaaacagatgatgttcaatatggctctcaatctcttctatcatcgcctcaccctcaggaagccctttaagcccgcttttgatttcggatacatatgtttctttatccattttgtccgctccacttcagtattcggtccatcatggctgaaaatacgctccattccttcgtgcgttccgccagcacttctttgccctcgtctgtaatccggtaatatttgcggtccggtcctttctcctgcttctcccagtaggaagaaatatacccttggcgttcaagcttgtgaagagaaggatacaaggtcccttctttcatctgcagttcatttccgctgcggcttcccatttcttttacaagctcatagccgtacatcggccgctcgttcagaagcgtcaataccaatataaccgtgcttcccttaaccagctcacgatttaacatctcaaaacccctacctagttttcttatgtagcattttacgaaagcccgttgagattgtcaaatgattcctatagatcttctatattgtgatacagagaaaatctaactataatgaaagacaaaacacgatggaggttcaagacatgtctatgcataaagcactcaccattgccggctcagattcaagcggcggtgctgggattcaagctgatttaaaaacatttcaagaaaaaaacgtatacgggatgaccgccttaacggtgatcgttgcgatggacccaaacaacagctgggaccatcaggtattcccgatcgatactgatacaatccgcgcccagcttgcaacaattacggacggcatcggcgtggacgccatgaaaacaggaatgctgccaaccgttgacattatcgagcttgcggcaaaaacgatcaaagaaaaacaattaaaaaatgtggtaattgaccctgttatggtttgcaaaggtgctaatgaagtcctttatccggagcacgcccaagccctgcgtgagcaattggctccgctagccactgtcattacgccaaacttgtttgaagccagccagctcagcggcatggatgaactaaaaacagttgacgatatgatcgaagccgcgaaaaaaattcacgcactcggcgctcaatatgtcgtcattacaggcggaggcaaactcaaacatgagaaagccgttgatgttctctatgacggagaaacagcggaagtccttgaaagcgaaatgatcgatacgccttatacacatggcgcaggctgtacgttctcagcagccgtgacagcggagcttgccaaaggtgcggaagtcaaagaagccatttacgcagcgaaagaattcatcacagcggccattaaagaatccttcccgctaaaccagtatgttggtcctacgaagcattctgcactgcgcctgaatcaacaatcataaacaaaaggggctgcctaacaaagaggcagccctttttaaatcaccgaagacttttcacagaaaaaactgccgatcccatcggcagcctgtttatttgatttttaaattgtttgcagatttcctcaaaaatgtttctatcgactgaacaaaaagtgcatattccttcatttgttcatatgcccgcgtgagaatttccgccgtttcactgtgcggcgttgttccgccaagcatttttttcagctgaagcagcacatccttatattcttcccgcttatcttcaacttggttagcagccttttccaaacattccggtgttatcttctgttcatttatattcaagaaaacaactccttttacagaaaaaaatagtaggttatcgttgaagaatagcacagatggctcagatttcacataagaaaatagaaggattttctacataagtgtccaaattctgacattcatttcagatttcccggtcgaactggctgttacttcatgatttcccgggaaaggaaaatatctcgcactaaagacctcttctccgttattgataaagatttcaacagaggatgcgtcgataaacatgtgcacggtatgcaaatccttgatgcggcaatgtctcgcttctgttctttttccgtcaaagccctttcgttccagcgtaacattccccttgtctttatggaaggaaaacgtagccgttccgcggatactgattgaaaagcctgactctgtatgaatgtcttccagcagaatctcagttctttcaggtttttccactggaagcgtaccagatgatccatgcatgttgatgtgtatttttttctcatttctgcgcatggcttttagctcaggcagcggctgctgaatcagcttctcgcctgatattgtcagctgtctcggcagcgtcatgcagtgaatccagtgatagtcaatcgtcggatgagatccttcatcctggtcaggcacagccatccatgcaaacaaaattcgtctgccctgatcatcttcaagtgtttgcggcgcgtaaaaatcaaaaccttgatcaagttccctaaaatcaccatgcttcagttcaggcttgttataatcgagacgcccgacaaaataacctgactgatatacgttctgataaaggaaaccgtcagcctcaagcccttgaggcgaaacaatcagcacgtccgatccttgaagggaaaacaaatcagggcattcccacatgtatccaaaatcgtccagcccgttgaagcccgcgccggttatcgggccaagaaatctccactcactcaggttatcagaagcaaacaatacagcctgccctttcaaattctctgtttgcgcaccaatcaccatataccatgtgccttcatgctcccataccttcggatcgcgaaaatgcgccgtatatccttccggaaggcgggcgacaacaccctttttctcaaaggacagcccgtcgtcagaaacagcaaggcattgatacgtttcccgatttccatcctgatccctgacatttcctgtgtaaaacagatagagccgatcgtctttcgtgacagcgctgcccgagtagcagccgtttttatcaaaccaatcactcggagccagcgcaatctcttcccgcttccaattcacaacatcctgtgtcgtataatgcccccaaaattttgcgccgtgccccgtctgaaacggctgccactgaaagaatacatgatagctgcccttccaataaatcacgccattcgggtcattcagcagcccaaccggcggcatgatatgaaaatgctggcggtgcggatcgctgttagcgatgggctcttttttctccacttcttcataagcccggcgacgaagctcctggtcatgtgctgtcattttttcctctcctcatcctcattaatcttcatgacaaatgctgcaatgaacgctgacactgctgcaatcgccatgccaatcagatagtgaatcaagttgctgacgccaaacggagccgcaatggcgatcatcggaattcccgttaacccgtaagcgtttgcagctacatgtgtaaagacgacatatgccccacccaatgcgcctccgatcatcgcggcgataaacggttttcggtagcgaagattgactccgaatatgacgggctcagtaatgccgagaaaagcggaaaatgctgccggaagcgcgatttcttttgtctttgcctttttcgccataaagaagacggcaaggcctgccccgccctgtgcgacattcgccattgaccagataggcagcaagtagtttttgcctatatctgcaattaaccccgcctcaatcgcatggaagctgtgatgaacacctgtcagcacgatgagtgaatacgtgcccccgaaaatcaaacctgcaacaaaaccggcatggtcatacacataagttaaagcaaccgtaatcccggagccaagggctcttcccagagggccaatcgcgataaaagcaacaaacccggtgacaattacagtaacaaaaggtgtaacaagcaagtctaccgcatgcggaaccacttttcttgtccatttctctaccttgctcattacataaaccgccagcagaacagggatgacagttccctgatagcctagaagcgcgatatcaaatccgaaaagatgcatataatcaggtgtggcttccgccaatccccatggatttaaaagagacggatgaatcatgattcccccgatgaccgctcccaagtatggattgctgccaaactcttttgaagcgctgaccccgattagaatcggcaagaaaatgaatgctgcacttgaaaacatatcaagcagctgcaaaagcgcagaatccttgctcatccaatgaaacgcattgatcatacccagcaatcccattaataggccgctggctacaatagccgggatgattggaacaaaaatattagaaagcgttttcgcaaatctcgcagcgggattcagcttttcttttgccgcatcctgatgatttacgtgttcttcacgctcgatatcagcttctttagaaaaggcatcgaatactttattcacaaggcctgttccgaaaatgatctggtactggccagagctgctgaaagcccctttgacgccatcaagctcttctacttgtgcttgatctatctttgattcatctttcatcactaaacgcagtcttgttgcacaatgagccgcgctgataatattttctttccctccgagaagctcaatgaggcgttttgcagtctctttgtaatccatctatttctcccccttttatttaaacaaaaaagacctaaaattcgccaacgaataaaggacacagcgatcctttttcatttacgcaaattttaggtcttgcctgctttaccagtcacaatcccgcttattcagattaagaatacgctttcatcataaatcatgacagcgttttcgtcaactatttttttagttaaatagtttgataaaacatgtagacaaaaattcgtaaaaattaattgtgaaatacttcacaatatcgtgctatactatgctcaatcatgaaagaaagcaggaaaagacaatggaaactcaagcattgcaaaaggttgaacagtatgctttgaaaaaacaaaacatattcgcttcaagcaaaatccgttatgtgcttcggtccattttggccagtatgtttattggttttggcattacagccgcaagcaaaacaggcagctatttctttatggctgattctccgtttgcctttccggcagccgctgtcactttcggggccgctattctgctgattgcttacggaggcggagatttatttaccggcaacaccttttatttcacctataccgcgctccggaaaaaactcagctggcgcaacaccctgtacttgtggatgtcaagctatgccggcaatttaatcggcgccattctgtttgccatcctgatcagcgcgacgggactttttgaggagccttctgttcattcctttttgattcatttggcagagcacaaaatggagccgccggcttccgaattgtttttcagaggaatgctgtgcaattggcttgtgtgcctcgcctttttcattccaatgtctctcaaaggggaaggagcaaagctttttaccatgatgcttttcgttttctgcttctttatttccggctttgaacacagcattgccaatatgtgcacattcgccatctcgcttttgatcgagcaccctgatacagtgacactgatgggagcagtcagaaacttaatccccgttacgctcggcaatctgaccgcgggaatagttatgatgggctggatgtactacacactgaatcctgatcaataaaaaaacttccagagatcactccctgcaagtcaaagcggttattccgagagatcttgaagacgctggacatgcagcgtgatatagccggcctcggattccggcaaatgtaattgatattcatttttcaaaaactccgccagctccagcgcacattgataggcgaatgaatactttttttggatgaaataaagcatctcctcgtccatacgatggagcgcttcatttgattccaaccggctgaccgcgtatcgcaaatgcgtgacaaggcgttgataggaaatgctgttttcatccacctttcgattaaagtattgttctattttctctatcatttctttgatcatggtcgtatgcttcagcgctgaatacatgctctccgcatccatcttcgccgtatggatgtgaagggcaatataacccgcttcatcttcaggcagagacacgcccaatgtctcttttacatgtccgatcgcccacaggccgatctcgtattcttttttatagagcgcctttatctcatgcagcaatttattctgcacaagcaacccattttgaatcctttcgatcgcaaaggacaaatggtcggaaagcgcgatatgaatgtgatcgctcagcggcgccgcgagctctccttccgcatagctgatgatatcctcagctatttctacatgctcctccggcagtgtttgcaggatttgtttgaacttttcattctcgtcgcgcacgacaaagattttttccactttattcatagggatgagatcatttttctttttttgaaaagcgattcccggccccatcacgattttttcctgatcatcctcttttattaaagccgcattgttgtttaatactttatagattttcaagaggttatctctcccgccaatttgcttttgactgggattttacctccttttgaccgccatgtaaagatgcgggcccgctctctcctgctttggcgattccttgaaggcttgcaaacatcttcttttataaagcgcggcggctttcgctttctgcttttcttcctcattcacagccatccgccactcataaaacgaaacgagtcctgcggcctgcacagccgcctttctttggtatgtacgctgagccgaatagaccgcggcagccgcagtttttctgtccggcgtcacccagttcatcaaaaagaccatccacacccgtaaagatacaagcaaacgtttcatagaaaaacatccctccgcttctttttggcaggcagcctttttagcagcccgttttctcagccgcagcccgcaagaaaagacggccgatttcttttctcgcaaactagcggctctagcaaaactcatgactctatgatagaccgtggaaagagaattctttgtcacaatatgagtgaaaaaaccaactagtttttagaagttttgttgaaagctgaaagaattgaaatgaaaattggagaaccgctttgaaaactttatacacaagttatcccaaagataagaacaacttaatcacaagagatatccacatgtccacaaactctatctatattttgtatacgaacgtatattcctaactatatatatacacaggtttattcacttatacacagggttctgtgtataactccttcgttatacacaaacaaactccaataaatggtccaaatgacacaaggatttttttgaattttcaagaaatatatactagatctttcacattttttctaaatacaaagggggaaacacattgaaaaaggggatcattcgctttctgcttgtaagtttcgtcttattttttgcgttatccacaggtattacgggcgtccaggcagctccggcttcttcaaaaacgtcggctgatctggaaaaagccgaggtattcggtgatatcgacatgacgacaagcaaaaaaacaaccgttatagtggaattaaaagaaaaatccttggcagaagcgaaggaagcgggagaaagccaatcgaaaagcaagctgaaaaccgctcgcaccaaagcaaaaaataaagcaatcaaagcggtgaaaaacggaaaagtaaaccgggaatatgagcaggtattctcaggcttctctatgaagcttccagctaatgagattccaaaacttctcgcggtaaaagacgttaaggcggtgtacccgaacgtcacatataaaacagacaatatgaaggataaagacgtcacaatctccgaagacgccgtatctccgcaaatggatgacagtgcgccttatatcggagcaaacgatgcatgggatttaggctacacaggaaaaggcattaaggtggcgattattgacactggggttgaatacaatcacccagatctgaagaaaaactttggacaatataaaggatacgattttgtggacaatgattacgatccaaaagaaacaccaaccggcgatccgaggggcgaggcaactgaccatggcacacacgtagccggaactgtggctgcaaacggaacaattaaaggcgtagcgcctgatgccacacttcttgcttatcgtgtgttagggcctggcggaagcggcacaacggaaaacgtcatcgcgggcgtggaacgtgcagtgcaggacggggcagatgtgatgaacctgtctctcggaaactctttaaacaacccggactgggcgacaagcacagcgcttgactgggccatgtcagaaggcgttgtcgctgttacctcaaacggcaacagcggaccgaacggctggacagtcggatcgccgggcacatcaagagaagcgatttctgtcggtgcgactcagctgccgctcaatgaatacgccgtcactttcggctcctattcttcagcaaaagtgatgggctataacaaagaggacgacgtcaaagcgctcaataacaaagaagttgagcttgtcgaagcgggaatcggcgaagaaaaggattttcaagggaaagacctgacaggcaaagtcgccgttgtcaaacgaggtagcattgcatttgtggataaagcggataacgctaaaaaagccggtgcaatcggcatggttgtgtataacaacctctctggagaaattgaagccaatgtgccaggcatgtctgtcccaacgattaagctttcattagaagacggcgaaaaactcgtcagcgccctgaaagctggtgagacaaaaacaacattcaagttgacggtctcaaaagcgctcggtgaacaagtggctgatttctcatcacgcggccctgttatggatacgtggatgattaagcctgatatttccgcgccaggggtcaatatcgtgagcacgatcccaacacacgatcctgaccatccatacggctacggatcaaaacaaggaacaagcatggcatcgcctcatattgccggagcggttgccgttattaaacaagccaagccaaagtggagcgttgaacagattaaaaccgccatcatgaataccgctgtcactttaaaggatagcgatggggaagtatatccgcataacgctcaaggcgcaggcagcgcaagaatcatgaacgcaatcaaagcagattcgctcgtctcacctggaagctattcatacggcacgttcttgaaggaaaacggaaacgaaacgaaaaaagaaacgtttacgattgaaaatcaatcttccattagaaaatcatacacactggaatactcatttaatggcagcggcatctccacatccggcacaagccgtgttgtgattccggcacatcaaaccgggaaagccactgcaaaagtaaaggtcaatacgaagaaaacaaaagctggcacctatgaaggaacggttatcgtcagagaaggcggaaaaacggtcgctaaggtacctacattgctgattgtgaaagagcccgattatccgagagtcacatctgtctctgtcagcgaagggtctgtacaaggtacctatcaaattgaaacctaccttcctgcgggagcggaagagctagcgttcctcgtctatgacagcaaccttgatttcgcaggccaagccggcatttataaaaaccaagataaaggttaccagtactttgactgggacggcacgattaatggcggaaccaaacttccggccggagagtattacttgctcgcatatgccggaaacaaaggcaagtcaagccaggttttgaccgaagaacctttcactgttgaataagaaaaagccctgccgaatcggcagggctttttaaagatcagtcagcaaacgcctcctgcaataatcgatacgatcggagcttatcttcaaaatgatgtgtgatggtcaccaccatgatttcctctgtttcatacgctttactcaaagctagcagccgctccttaacctgttctttcgtaccgacaatcattcgatttcgattatcagcaattcgtctctgttcataaggagaatacgtatttttccgaacagcttcatacgaaggaactccctctaaaggaataccctgctctcccgccaaaagtgtaaaatcaagcacagccccaagctcctctgccttctcctccgtgtcagcacaaagaacaaaaacagcaactgccgctcgaggcgtatctcctaacacagacggtttgaatcgtctcttatactgtctgacagtaccctctccgccctctccattgataaaatgggcaaacatatagccagcgccagattcagctgcgagcagcgcgctttctccagatgagccgagcagccacacatccggagccgttgaaatatgcggcgcagccgtcagattcggaaaacggtgtttatcatccgccaaatcatgcaaatacatggtcagctccttgatttgctgcgtatactgatcagcattgcgcttaccgccgtcattcagcgcccatgatgcaatcggcattccccccggtgctctgccaagccccaggtcaattcttcctggtgtcagcccctccagaacacgaaagttttcagctactttataagcactgtaatgcggcagcatgactcctcctgatccaacacggattcgctttgttttcgccgctatatgactgattagcacctcaggactggaccctgccagccgttttgaaaagtgatgctcagaaacccaaaatctcttatatccaaggtcctcagcagcttgggcaagcgcaacggtttgctgtaaggccgtttctgcattgctgccctctgatactggagattgatctaatatacttaatgaaaccatccctaccacctcatcctcatcgtatcactgatcttctactttttctccaaagccgctcacattgcttatcagtgtcccctatcattcgccatttatttgtgaaagcctgtccctatttgtcggaatatgttacacgtgaaacataaaaacccctccagacggagaggtttgctttagtttttattaaagcccttttctttcacgtagtcatttaaatacgtacgcggcttttgcttcataaagttcagtatttgatcggaccacgtttcttcccgctgcccgtttgttctttctctatagtaatcagaaatggttttgtcatacgtattcatagtatgacggaaatcgtctgtgttcacattatacgtattctcatgataaacggcctgctttggcaatctcggttttttgccggaaaggttcgcaggatggcctactgccagtccgaaaagcgggagcacatggtcaggcgtttgcagcacctctgtcaccttgtccagttcattccgaatgccgccgatatagcaaatgccaagccccatggattcagcggcaatgctcatattttgcgctgccagcgccgcatcaatcaagctaaccataaacatttctgtattctcgagcagctcagaaatatgttcacctttttcctcagccagtttttgatggcggtacaaatccgcacaaaatacaaaaaagtgtccgttcttctcaacgtaaggctgattcccagcaagcacggacagctcacgttttttctcaggatcagaaaccccgataatcgaatatgcctgcacatagctggatgtagacgcagcctgcgcacttttcactaatgtatcaatttcttcagctgtcaaaagctgatcagtaaaagaccggattgaccgatgattcaaaatggtttcgattgtgttattcatcacaaaaacctccttatcactttttatcatatccgaaaaaaagtgatctcaaaagcgaaatgctctgcacaaaaaaagacagcctctgtaaaggctgtctgcatattaagaattaaaaagataacttctgtatttcgtcagctgcacacttgcattatatacaatcccaaatccgattaacgtggaaagtgtcgagcttcccccatagctgacaaacagcaacggaatcccggtaacaggcataatgccgatgttcattccgatattctggaatgtgtggatcacaattaacgccgtatagccaacgcaaaagaaagaagcgaaacggttaaacggatgtattttgtctatcagaacaacaagcctgtagattaaaaagaagaacatgatgacaacaattgcacagcctataaagccaaatgactcacctattatagaaaagataaagtcagtcgtactctctggaacataaaccttcaaattagaaataccattacctaaaataccaccagatcctattgccatgatggcctggtcaacttgccagctgtcatttgaatcttcctgtgtctcatttgaagcagacacccaagaagtgacccgcttaatttgataatcctgtattccaactgatttagcaacgtcaggaaagtttatcattactaataaaattaatgaaatgagtaagatacctgaaccagctatgatcgcaatcaatttccaatttatacctgacataaaaaccattacaagaacgataaacatacatattcccgcagtcccagcatcctgcatcaagataagacctacaggaataactgcgacacccgcaatctttaataacaagtggatatcatccctaagcgtccgaactcctttaggattagcttttccaataactgaagcaagcatcataatcaaaccaaccttcataaactctgacggctgtattgttattctaccgatcctaaaccaactttttgcccctttaataacaggtgcaatagactcgggactgattttaagaataatcaaagataaaataccaatgataaaaatatataaacttaacttttcaagctgttctaaatcaaagtacaaaagaactgtaatggcaacagcccccaaaaaataaaacacaatttgctgaatccaatccgtgttcccatactgcccaaactgaccggcagcataaattgatactacgcttataataaaaaacacaccaaatataaaaatcaaatccccctggtaaaaggggctttgctgtttcttatatcgactcattctatcccgccttacattttcatcggaaaatcactaatgtttattatacatgaaccacgttcaagatgacacgtgaagctcgcttccttttatgttttttcagcatttgcggcgctttttcagctacacgaaatatgacgtatcataaaccgaaatgtttcgattgacacaaaacttttcaaatgaaaaaaacgccataccaaaagaatttgttaaaaaacgaatgcgataatgtgttatattcccaaataatgtgatacctcataagaaacagctaaaaattcagagccccatgcccatacattctcctagcacattaaacgaaaaaataagacgatagatccagtccatttctgcaaaaacacgtatcaatttctggaaaacatggtataataattgtaacagaatattcaaaaaacaatcacaaaacagacacaactcagttcctctatttcatttttgtaaacgttatcacaaaatgaaaggagacgggtatgatggacatgttttttgcttacttattggttgccagcgcaacgcctctctttatttggcttgataacaaaaaagtcgcactctcagctattccgccaatcattttaatgtgggtattcttcttcttttacgcaacagaaagcctttctccacttggacacactctcatgattatcttgtttgccgttaacgtcattgtcgctcatatcgccgcatttatcatttacggccttccgtatcttcgcagaaagcgaagcagctgaagacagcaaaaaaccctcttccaatgaagagggtttttgtattattcgttatggcctgaatgctctgagtgttcagcgcctccaggaggatttccgtccatatggtcaccatggtgatagtgagccgcgaaaatccagatggatccaagtacgataacgatcgcgccaaagaatccgaacagcgtgtttccgacttggatcgtgccgttttcgctctctgtcatatgcatgaacatgagaagctgcagcgccgcctgaatgaaggcgaagccgaagataatccaaagttttgctgatgagctcaggtcagtatacactgcaacccatagagccagcagggtcaaaacgatagacaggataaaacctacaatgtgtttccatggaaagtgactgtgttcagcagatttgtttgccattttacagacccccaatcccatgagatagacacctgtaaagatgaaaatccatacaacatctaagaagtgccagtacaagcttgagataaagattttagatgaagtttgcggagttaagccgcgtttcttcaactgaatcagaattcctgtgatccagaaaatcccgattgttacgtgagttccgtgagttccaagtaaaacaaagaatccagaccagaacgcacttgtactgagagccgctccttcatgtacatagtgaacaaactcgttgatctcgcatccgacgaagccggcaccgagaagaagagtgataattgtccaaatgactacgccttttaaacttccgcggcgcatttcatgaacagcgatcccgcaggtaaagctgctgatcagcagcaagaacgtcataatcattaccagattgacttcaaatagttcgtctggcaagacacctccagctgttctgtttttaagaacgaagaaggttgcaaatagtgttgagaacaacacaatttctgcccctaaaaagatccaaaacccgagaatattaagtctgccggtttcagattgatattccataggcgcgttagaattgccgtgttctgcatgttccataactcacgcctccttattcggaaatctttctttccgtctcttttatttcatcaacactaatgtagtagccgttgtcgtattcgaatgaacgcagaaccatgcagagcaggactccgatcaatccgactacgcccatccagtaccattcaaagacaagtccaaagcctgcaagaccgaaggcaacagacataaagaacggtctgcctgagttgcttggcatatggattttcttgaatttgctttcagggtataattcagttttttcttctttcatatgcaggaatgcatcttgagatttgacttcaggaagcaccgcaaagttgtaatgcggcggaatcgcagaagaagtcgcccaatcaagcgtacgtcccacaccccatgaatctccgctgatttcacgagtagagtaacggaagctgtagtagatgttatagcaaaggattaagaatcctacacccatcatgaaagctccgactgttgagataaagttcaatgttgtccagccgtcattcggtccgtatgtgtaaatacggcgaggcatgccttgaagccccaagaaatattgcgggaagaaacaaatattgaacccgatcataaagatccagaagaaccattttccgattctttcgttcagcttgtggccgaacatttttggataccagaaaataaatccggcgaaacaagcaaatacagtacccgcgatcagcacatagtggaagtgagatacaaggaagtacgtattatggtattgataatccgctgctgccatcgcaagcataacccctgtaaccccgccgataacgaagttaggaatgaacgcaagcgcccacagcataggtgttgtaaagctgattcggcctttatacattgtaaagagccagttaaagattttaaccccggttgggattgagattgccattgtcgtaattgagaagaatgagttaacggacgcactgttccccattgtgaagaagtggtgagtccaaactaagaaactcaatacagagatggcgataatagaaccaaccatcgctttgtaaccaaacaattgttttcttgcaaagcttgagatgatttctgagaaaataccaaacgccggaagaataacgatatatacttcaggatgtccccaaatccagaacaagttagcccaaagcatcggcataccgcctgcttccaatgtgaaaaagtgagcgccgaacaaacgatcaaatgataaaagtgctaatgctactgtaagtacagggaaagcaaacacgataataaccattgtgatcagtgttgtccatgtgaacattggcatacgcattaatgtcatgccttttgttctcatttttaagattgttaccataaagttgatccctgtcatcagggtaccgataccggcaatctgaagtccgaggaggtagtagttctcacccggcccagggctcatgtcgttacttgcaagcggcatataactcgtccagcctgcgttcggagaacctccgataacgaaagaaatattgaaaagcatcgcccctacaaagaacgtccagaagctcaggttgttcaagtaagggaacgcaacgtcgcgggcaccgatttgaagaggcacaacaacgttaataagaccgattaagaacggcatcgccatgaagatgatcatgattgtaccgtgagttgtaaaaatttcattatagtggtttgagtctaaaaaactgttattcggaagcgctagctgggcacgcatcatcagaccgtcgacaccgccgcggaataacataattacagcagatataatgtacatgattccgagttttttatggtcaacagtagttatccattcagaccacagccatttccactttttgaagtaagtcagtacaaaaataatggcaatggttgaaagcgcaatggaaacttgtgcgcccagaattaatgggtcaccagttacgaaaaattcgtcccatttgaatttcatgcaggcttcctcctttcctgatcaatatcattcttctgtatcatcagacttcttaaattcgtttttctttacgttttcaaacggatctgttttagagtgcggtgaaacggcttgatagccaaggcgtttgcgcgcctccatcgcgtactcagcgtcttgtccgtgatcaacgtatttcaagtgagtagaagagaacgttaattcgtccacattttcaggaagcatcaattcatcatacttctcttttgtcagcttaggagcctcgttctgagtctttttcacccagctgttaaagtctttttctgtaactgcattcacatcaaactcttggtctgcaaaatgttcacctgtgaagttcgcgttgcggccttcgtaagtacccactttgtcagcctgtaagtattgatccatcagcattcctgccatcgcatatttttgccctccaagctgaggaatccatagcgaagccattgaatctgcagatgagattttgaacaagatcgggcggtcgacaggaatgtttaagtagttgaccgtttcaatatcctgttcagggtagctgaatacccatttccagtctaccgaagtagcataaacaacaagaggctctttatcttttgttgcttcaggagctttttctaacgaatatatcgtctgtactgttggcacagaaagtgcaatgacgattaaaattgggatcactgtccagactacttctaaaaacgtgttaccgtgaatttctgggttataagatccattatctttgcctttacggtcgcggtattttactaaaataatggtaaatagaacaaagacgaccccgacgataaacagcataaatccgatagataacaggattaaatcactttgctgttcagctacaggtcctttcggatctagtactgaagcattgctgcatcccccaaggacgaaaaccacagttaacagcgctaatacaagcaacggttttaatgctctgaacaagaagatcaccatccttcctattgatgtaataaatctgaagtgcatacttcctcaaaatcttttctctactttgttatgctatcaaaaacttcacttattagctttatttttttataaacttcatcccattttcgcttaaatgtcataaaatcgacaaaaattgctccaactttattcacatctatcgcttaagatgaaaagtttctagttatttccgcatataagtaaagaaaagatgatgaagaactaattctgacaaataaaggtttaccacaataaaaaacttaggtcaatcaaaaatttcattttgttaaactttctagataggaattattttttccttgtctagcatcttttcacacggttaccattttaacgcatcaaatattgaaagaaaaggcgcaatgaagagccaatatgctctgaattgtccgtattttttaatgagagcatccagttgtttatcttatacaaaaaagaggaatgatataagcaaataaataaaaaataggatgtgttgcatgatgagttttcttatttcacttatcgtcgctattattatcggatggcttggaagcctgtttgtaaaaggagatatgcccggaggaattatcgggtctatgatcgcaggtcttattggcgcctggatcggacacgggctgcttggaacatgggggccgcacctagccggatttgccattattccagcggtaatcggtgcagccattgttgtctttctagtaagcctgttaaccagaaaaagaggataaaagcagcagcacccgaagcgtcagcgctttgggtgtttgttttgccataaaaatcgaaaaagcctcaaccctagcggttgaggcttttgactggtttggcgcccaactggtcgataaaccttctgaaggcctgttttccttctgttgtctgtttaaacacaccggcgtgttcaaggatgcgcgcgaatacatgtcccagctcttcttttatgactagatctgcattctcttttgttatggttcttttttccatcatccgattagcccactcactatgttttgccgtgagcggattttgttctaaagctgttttcggatcagcagagcatagcgccgctgccgtttctttcatttcctcctgtaagcggcccggcaatatcgccaatcccatgacctcaatcaggccgatattttcttttttaatatggtgaacttccttatggggatgaaatatccctaatggatgctcctcatccgtccggttgttcctcagtacgatatcgagttcatacaagcctcccctgcgccgtgcaatcggtgtgaccgtattatggggcgtatcgcctgtataggcggcaatgccggctttttcatcggaatacgtctgccacgtgcggaagatatggtcagcagcttcggcgacatgacccggttcgtctccttggagcctgagcacagacatcggccacttcactaagcccagcgacacgccgggataatcgtttaattcataaacgtcttccgcttctgcacgtgccattggaaaatcatgcgcgccgccttggaaatgatcatggcttaggatgctgccgccgacaatcggcagatccgcgtttgaaccgataaaataatgcggatattggccaagaaatgacagcagcctttcaaatgtttttttgctgatctccatcggttcatgttcaccttttaagacaatgcagtgctccggataatagacatatggcgagaattgcaggaaccattgttcgtcctcaaggatgaccggaatgattctgtgattttgccgggctggatgattcacgcttccctcgaagccgacattttctttacacagcaaacacatcggataatttgtctgttcctgctcttttgcagccgcaatcgctttcgggtccttttcaggctttgataggttaatggtcatttccagctcgccatattcggtcggcaccgtccaatgaacatttttggcgattctgtcagtccgtatataatagacatcctctgaatattgatagaattcctttgtcgcctgttttgggccgtataatgcttttgtctcttcaaatttgcgaatgacctcggacggggcaggcacaaaacagcccatcagctttgcgctgagcaggtcacggtacgtatctgtatccgcttccattcggccggtttcggcagcccatttatagatgggagctagcaagtccggcaggctttgtgactgcttgatgctggtgctggagttcggctcgggatgtgtgatgcccagcgcttcataaagacggtttctcgtatattcccgatcccagatcgaaatcaattttcgttccaggccatactcaagcagctgttccagatgttcaataatactcatatgtcactccccctttagttctctcgctccctctccgatatccgcgacataaaagtccgctcggagccctgttttttcttgatatctgtctccaaccttctgaataaaatcatcaacgaactcatcttttacaatgctgatggtgcagccgccaaagcctgctcccgtcattcttgatcctattacaccttcgtgatcccatgccgcaaacacaagctcatcaagttcagggcatgttacttcatagtcatccttcaatgagaggtgggattccttcattaactgcccaatttcatctatattgttctctttgaacatatgggccgtcttaatagcacgatgattttcgtatacagcgtgctttgcccggcgtctgttcgtttcattttggatcaggctggaatgcgcatcgaaatcagaaggcttgatgtcgcccagtgcggcaatatcgaggccttttttcagatcaagcaatgcatcattgcattcttggcgtctcgtattatagctcgagtcagccaatgtcctttttttgttcgtgttcgcgatgaccagcgcgaggcctgagacattgagtttgctatattcatagtcaagcgtgtcacagttcagcagcatcgcatgatgttttttccccattccaattgcaaattggtccataattccgcaattgacgccgataaaatcgttttccgcatgctgcgccattttcacaagctcaagcgcatctacttcaggatgaaaatagctttggagcacgacccccatcagcagttcaatagaagcggaagacgacagccccgccccgtttggaatattccctgaaaatacaatgtcaaagccatagggaactgcatatcccctctgttgaaattcataaatcacgccttttgggtagttcgcccagtcgtcttctttttgatagcgaatgtcgtcaaggctgcattccttgatcccctcgtctttaaagttgtctgaatacatccgaacaagcccgtcttttctttctgcaacagcagcatatgtacccattgtcagcgcgcacggaaagacatgcccgccgttatagtctgtatgttctccaatcagattcactcttccaggtgcgaaaaaaaaccgtaatccctctttttctccgaatacacttgcaaatatcccctttagctcttcccgcatgtgcaatcacctttctggtttttattttttattccccttatttctccatagaaaacggcagatcatatgctgcagtcctctcataccccttcttcttttgtttttttaaagacgagccatttgctcgcaacatagttgacgacaacaatgaccgcgttgtcgagtattttggccaaggtttcatttgtattgaactggccgacaagaatgatcatcatgcctaaatctatgccgagagacaggacccgaacgctgaaaaaagcagtgagctctttcagcaggctctgcagatcatgtgttttttgctgaaacacatataatttatttgttatgtaagcaaacagcacggacaaaatccaagcggcgacagtggcggctttgtaatccacattcatgatctctaccaatatataaaagctggcgatattcacaatggttgtgaaaacccccataatgatatacataattatttctctatacttcactgatgttcctcgctttctgaaaaacttttcaaaattcttggcctctcgtgctctctgtctaaagtaaaaaataccgaaagtgcgtctaaaaagctgcggaaggtggctggctggcccaatacatatgattgtttgatgattccgtcgaggactgcacatattattttagccgtatattcaggatcaatacaggcgtcaatcagctttctctccttcagccacttaatatataacacattttcttccacccacaattcgtacagccggacataggccttgcatttctttaagactttatatgtcggcatgttcatggcaaacgaggtgatgtcccacgacggcttatttatgtaataggaataaagcagttctgcagcgtgttttgcagcctcgtccaatgtcagcgatttcactgactcccgctccatttgatcaagataccctataatgatcttttttttcatctgacgtttttcgagaaggtacagcagaaaatcgtccttgctgacaaaatgaacataaaatgctcctttgctgtacccggcggctctgctgatatcttctacagaaaccggatcatacgctcggtcaatcaacaaattcacgccagcgtctataaaactttcaaatgttgcttctcttttaatttgaaatttgttttttttcatatttttctcctggcggtaatgattacccttatcttacaccggatcaatctttagcggtatttatttctttgaacggttatgctattcggtttcccaggggtcatttttaataggctaaatgatttattttcatttacatactatccagtcagtatttaattgtttattattataaataaggtccattggttatattagtcatttttttagggaataggtaggtggtttttccttcagtttgtgaacaccgagcaactatgtgtgaaatttgttgtactcgcctcatcatcgcgctggcttgtcttttattgcccgcatgttgcaggaaaacattttatacaattggaggttactatgaaaactcatgttaaaaaagatttggacaaaggttggcatatgttaattcaagaagctagatccattggattaggcattcatgatgtgaggcagtttttagaatctgagacagcatcgagaaagaaaaaccacaaaaaaaccgtccggcaagactagtccgaacaggcggatctatttacctctggcttttctatcacctgatctgagttttcaccatatcctctattcaaaagcaaatcgctgcgctgagcttgaggacaaacggtgtgtcagctaactacgacagacagccggtgatgcgatcacctcttggcacatgcattgtcataaagaggtgatgcgaacatgataaccgtgctctggtaaacagcagctttgctgagaacaagctgcattcggtgaggttttgaaagcaaactcgtttatacacggccgagcttgaaaaccttcgcctgtctttagaccactgtgttcacctcttcacgacttccttcttttttcatcctccagatattgttcaacgcataaatcggactttcagtacatacctattggtgtacctttttgcttacgtttagcgaataaaaggaggaaagccatgtacaaagctgattataaacagattgctgcaacgccgtcttttcaagcttttttaaagcagaaacgcgcttttattgttccttctgcgattttcttttttgtcttttatttttcactccctgttttgacatcttatttcacctttttgaatgcaccggccattggagctgtttcatgggcttggctgttcgccatcgcccaattcgctatgacctggatactgagtactgtgtattcccggagagccgctcatttcgatcagtatgtaagcgctttaaaagagggtctgaagggtgaacagacatgaatatgactgcttttttattatttttggcgattgttggcctgacgcttattatcacgtattttgccgcgaagcggacgaaaacgacgagtgagttttatacggcgggcggcgggctcaccggcgttcagaatggactggcaattgccggtgactacatgtctgccgcctcgtttctcgggattgccggaatgattgcgttatatggatttgatggcttcttttacagcatcggttttctggtggcttatctcgttgtcttgtacatcgtggcggagccgcttcggaatcttggaaagtacacgatggcagacatgattgccgctcgctttaaagaaaagaaaatccgcggtgtcgcggctctcaataccattgccatctctactttttatatgatcgcccagctcgtgggggcgggcgcgctgatcaaactgcttctagggcttgattatactatggctgtcctcatcgtcggagtgctgatgaccatttatgtcgtgtttggcggcatgatcgcgacaagctgggttcaaattattaaagccgttttgctgatggccggcacactcgtgatttcgattatcgtgttttcgaaattcggctttagcctcaataccatgtttgaacagatgaaaacggctactccgctgggcgctgattttttgaaccccggaaataaatacaaggtgccgcttgagaccttgtcgttaaacttggcactcgtgctgggaaccgccgggcttccgcatatattgatccggttttataccgttaaggatgccaagacggcccgtacatccgttgtgtcagcgacatggattatcggtgtgttttacattatgacggtatttctcggctttggtgccgcggcatttgtcggttttgacgcgattacggcggctgatcaagcgggaaatatggcggctccgcttttagcaaaagcgctcggaggagactttctgttcgcgtttgtatcagccatcgcctttgccaccattttggctgtcgtgacagggttggtgctgtctgccgcctcagcatttgcccatgatatttacagccagatcatcagaaagggagaagcaactgaaaaagaacaaatgaaagcggccagatgggcttctgtcgccgtgtcagtgctctcgattctccttgcgatttttgcacaatccttaaatgtggcgttccttgttgcactcgcgtttgcggtagccgccagcgcaaaccttccgctgattgtgtttacagtcttctggaaacgattcaatgcctcaggcgctttatcgggcagcctgacaggcctgatcagcgcgcttgtgctggtatcgatgagccctagtgtgtgggacccggctggaggtgctatttttaccggtgatccgctcattccgctgtctaatccaggaattatttccatcccgctcggctttctcggcgcgtggctcggaacggtgctgtcgtctgataaaacaattgatgaagatacgtttgcagaaattcaggtgaaggcgcatactggcgtccatatggaacaggaataaaaaaagctctctttatagagagctttttccttgtcttttcttctgttcttcagaaatcgctttttcaaatacatccttgccggcagcacctggaattacagtgtcgccaataataaaggttggaacggctgtgatgtcagcctcttcataggcgtgcttcaaggcttggcgctgcacgtcctgatatgttcttatttccagtgctgatttgaatgatgcaccgtctaatcccacttcctcggcgagcttcgtcaagatgtcaatgtcgccgatattttggccctcctggaaaaacgcctgaaagacacgggtgttgtattcatgtcctttatggtattccttcgcaaaatggaagccttcaaacgcgaggtctgtatacggatggggcgagacgtttggaaaattgatctcgacccctaatttctccgccattggctgaattgatgtctgccacatgtactgtttggaagggtcattgaccggatcaagctgaggagatgggcttggacgcagttcaaacggcatccactcgacttcaacatcctttccttttatcgcttcttcaaaagcggcttttccaacgaaacaaaatgggcagacgtaatctgaataaactttaatgtgtactgtcatgataatctcctttcgtataaattgattttaaactgtaacaattaaagttacaactgttttttaaataaagaagccgataaggcttcttttatgattccagcaaacgctgggcaatatattctccttttttgcagccgcctgggcatgcatataaagcagaaccgattgtttgtgtatattcgtttaacgcatcctttgctgaaagagccttcagcatcgggataaactgattgtcgggatttttttgaaaactgataaacagaagacctgcatccatatagccggttttcggatcaagtccttctgtgtaagagaaagctcttcgcaaaatttgttttccagtagatttcgctagactgacgtgtgaattagacggaatttgattcagcttcacgggatctgtttcctttttctgtccgaaaggcgcccccgagctttttctgcggccgaaggtatcctcttggtccttgagggaagagcggtcccatatctcaaggaacattttgattttccgaaaagccatataggtgccgcccgtcatccagtcaggctcaccagactgaatccacacgatcgagttcatcaagctgtcatcctccgtgctctggttgcctgttccatctttgaacccgaagaggttgcgcggtgtttcaccattttttcctccgcttaaaaagcctttgttcacaaagcggacctcacaagtgccgaccgcttgatttagcaggttacgcagcgcgtgaaacgccacttgctcgtcgtctgcacacacttgaatgcagatgtccccgcctccctgcttttcatccaggttgtcattgggcatcgctggaagagcggctaggtgcttcggttttttgcttttcagcccgaaacggtcctttccgtctttttcaaaaaagccaggcccaaatccgaatgtgaccgttaagttggaaggggataaatcagcagactcacctgtatcctgcggcggcagatattgatttctctgctccgctgacattttcttgccagacgtcagcatctgtgtgagacttgtccagtttctaaataacgtaatgatgtcgcttttgtcttttgctgttacatccagtgcagcaaaatagacatacgtctgatgggcagttgtgattccggcctgatgctttccgtaaaacggaacaatctgctcctcctctttttcatcctttttcgatggcttagccgcagtctgaacaagtggagcgagaccgccgagtccgctggcaccgatcgcaacggctgcccccgccattgcccccattttaaaatgtcccgtctgtgaatttgttctgactttttttgttcatcgctcatgctgttacaaaactccttttatagcacattcgcaatcttcgacatggtttcagaaagagtcgtcagctttgtgctcagctctctgatttgcttttcacttaatttatcataagacgtataggactgatcatttgttttgtattttgccattaaaacttcaaattcgctgaactccgtatccagtttttccgtcaagtcggagtgatcttttacaagcgcgcttttcactgtttgataaacggcttcggagccttccacatttgccataaggtcgactaaatcgattcgtgagtagcgctcttcttctcccgtgattttcgaaatcccggcttcgttcagaagctccatcgcgcctgctacaatttgttcaggtgttaatttcagtgattgaattgaaccgtcaagctcttttacatccttgagaagctggtcagctgttgccttttccccggaaatatcttgatccttccaaatggccttctcaagcttatggaagcctgtccatttgtctccttcttcaacatcgttttctcgagcatcaattttcggatcaagatctccgaggctttcagcgatcggttcgattcgctcgtaataaacacgcgctttcgcatataacgttttggacttttcgatatcgccggatttcacagcacccgtaaatgcttcagtcgctttgacaagctggtcactctgctctttgacatagcctttatactcatccgctgcttttgccagctgatcgctagcctttttgccgctcttcttcgcttctgtcaggtcttctaaggacgctttcagtgactcggattctgtcttgatttttgctgtatccggtttgtctttttgcgcttctgtgtagattggctgaagatgcttttcgatttctgtatattcgaatggatagtcgctgcgaatatcgttttcaaaggaaagccagtagctgtttaactctttccccttcttttcaatctctttttggtctcctttttccgctgagtcattcagcttagaaatgatggtttccattttatttacggatgcggtgatttctttagtgatcccgcttttttcagatgaagctttttctttagttgaagatgtgtcgttggctccgcagcctgcgcacagcgcaaggatgcatccggctgatacagcgatttttgtgaaattcattttgtcagttcctttccgtttgtaaaatgttttgccgcttctgaaacaagcgcaatcagtaaaaagaggaaaatcaacatttgcggaatcgtgctgtacacagacggataaattcctagcaccgatacagacggcagccagctttctgcatcagacggaagaatgcccgccagttgaaggctgtgaacgccggttccgagaaatttcacgcacatatacaggacaaccgccattgatagaagaaaaaacggcttcaatggaatgcgcattccgagcttgatcatcagaacaccgacgatgacgagaacgataagccctgcggcagttccgccgatcagttcagtgagcgggagcttcccgacaagcccgatgaaaaagatgaccgtttcgagaccttctcttacaactgccagaaatgcaatgagcgcaaaggaaagcaggcttcgtttttttagtgcctgtgacttctggatattgattttttctctccatttatccattgaggcgtttctgtgcaaccacaccccgacatacaaaagcatgacagcggacagtacgccggtgacgccgccaagcaagaaattgttttctccgaatacactggaggagaacagaaccgtgacaccgatgccggctgctaaggaaacagccatgccggcagacgctccgccccagatccatgccgaggagcgcgtgacccgcgctttttttgtcatggttaatagtgctccgatgacaaggagggcctccatcccttcacgaatcgggatcagcgccgcatcccaccagctgtagctgcttgaagcgatcggctcgagcaattgaatcatttcgtcaatttgctttgataccttttcgggatggctgccgatctccgccttcatcagtgccagattttcctccgatgtcgtataggcttctttcgattgggacacgacgtctccctctacggcgagccaggatgtaactaaattgtcgattgcggatgacgcttcatccaattgttttttttctatgaactgttttgtgtctttcaagctttgtatataggctgttaaggacgcccttgattgacctgaggatgtctttttcagcacgacagcctgctgataggtttctaaatgagacgcaagctcttcaagctgtgttttgagcttgcctgcgtcttgattgataaaagaaagagaaatcatcgcgatattcgcgtccatttcactgtgagaagaaaggttttctttcttaatagaaggttcttcttttttccacttcgctttgaaggtttcaaacgtttgttgtgccgaatccatatccccgtcttttacggatttgatcatttgcttgtttaattgaattaatgcggcgatcggatcatcttccgcatgtgccgcagaaccgaaaaccatcaacaagctgaatagaataagtgccagcccccgagccatcatgttcctcctataattgaaaatgattatcattgtataacataatcatagccagttcttgtcctttgtcaattaaaatttgaaggtctgaaaaccttgatggacagcaaaaaagctgtccttttacagaacagccttttgaaggaagatgaacgattatctttctgttttatatgtttgaatttcctcacgaaacttgcgtgcagcactctcaggatcttccgcctgactgatggcgctgatcatactgacgccatcggcccccgcttggataacaggtgcggcattatctattgtgatgccaccgatgccgacaattggaatgctgatgccttggcggcgcactgcttcaataagagataccccttgtaccgctctcgtatcttttttcgtttcagtcggatagatcggcccaagcccgacataatcggctccgtcttcttcagcttgcttcacctcagacatcgtatgggcagaaacgccgagaatcatatcacctatggcagctcttacctctttcgcatttgcgtcttcctggccgatgtggataccgtcagctttcagcttcagagccaattccacatcatcattgacaatgaacggaataccagcttcacggcaagctgcctgcgctttttcagcaaattcaatccgagcctctcctgtcagcgcatccccgcctttttcacggaactggtacagggtggcaccgccttttaacgctttttgtacaactgtaacaggatcggctttcgtattgtttgaccccataatgaagtatacagataataactctttcatcatttcccgagaaatacgagtcatgagacagtcaccctttctatagccgcccattcttggacgtcttgttcagtaacagttgaaagcttgttcagcaattcaatctgaaagcttccagggcctttgtcagccgtctgctgtgcggcaagctgagcggcgaccccatacgaagtaatggccgcaatagcagcaaacaatggattttcttccacagcgcaaaacgcaccgacgacggaagtcagcaggcaaccggcgcctgtcacttttgtcagcagcttgtggccgttatgaagggtgtatacatgtgatgtgtcggcaatgacatcgacttcaccagtaatcgcaatgaccgtgtttagcttttgtgccgcttgctgagccagccggatgatgtcgcctccgccttcacccgcatcaacacctttgatcagccaatccgtcacaccgacggtatgggcaatttccgccgcatttcctctgattgcagcaaggcgaacctcacgaatgatgtcacgtgccgattcagttcggaacggtgttgctccggcaccgacaggatcaagaatgacgggaacgccatgttcattggctgatttccccgcgatgatcatcgcttcgactgactccttgctcagcgttccgatatttaaaacgagtgcacccgcaatcttcgccatatcggcgacctcttcttttgcgtacgccattacgggcgatgcgccgagcgcgagcaggccgtttgctgtgaaattcgttacgacattgttggttatgctatgcaccagtgggctgtgccggcggacagcagtaagacattttgctgctgattgtgcatccatgtttgcatcatcctttactatcttttttcgggtcccataaatacgatttcgtatgttcgagccaagctctggcggcaaacgacaagtaccggtcctttctccaaataatggcgaggtgccaagggatgaccggatcgacaagcggaatgactttcactttttccgggtcaaggccgcggcagatccgttccggcaaaagcccgatcccaaggtttgctgataccatctcactgataaaatcccattgtgatgtttcataaatgatatggggccggaacccagccttgatacattccgtcataattcggttgtgcaggacaaaatcctctctgaagaaaataaaaggctcgtccttcaactcacgcagctgacattctttctcatcagccagccggtgggaagggtgaacgacaagcattaaggtttcttttacgattgtaaacgaatgaaagatatcttcgtttgcgggaaggaccacaacgccgatatcaagagagccgtccccgacaccttcttggacttttatagaaccgtcttcgactagctgaaaggtgacattcggatagttttcacggaaatcgccgagcactctggggaaaaaccccgatccgatcatcggcggcagtccaatccgtacgtgccctttcttgacttccataatatcatttaattctgacgtcaggttttgaaatgatttaatgatttcctgcgcctgcacatacatgctatgaccggcatcagtcagttccacctgcctgccgtttcggtaaaacagttcaattccgagctcttcttctaaatttttgatcatttttgatatcgtcggctgagatacataaagggattgggaagccttcgtaaaactttttaaacgggcgacttccaagaaatatgttaaatggcggatatccatgtgcttcaccctttctatagacaaaaggaatacttcttattcttaatatatattttacctatagagagaccttatgtacaataagtatataagggaggcatcaatatgaaaaaactgttgctaaccgttattcaaatcgctctgttatttatatttgctcggctgattaattgggtgacagcccttcttcatataaatattcccggcagtataatagggattgtgattcttttcacattattgcactttaacattatcaagcttgaatggatcgagcttggtgcagcgtggcttctcggggagctgcttttattttttatcccgtctgccgtcggagtgattgaatacggagacattatgtcgaaatttggtgtcagcattctgcttgttgtcatcatcagcacgtttgtcgtgatggtgtctacaggaacgcttacacaactcattgcaaagagaaaggagaaaaagcatacgtgttcatcggaattgtaagtttgtttttaacggttttggtgtatttaggagcaaaaaaggtatatcaacgctttccgcgtgtttatacgtcgccgctattggtgacgcccgctgtgttagtcggtctgctgctgctggtgaatgtcccgtacgagtcctataatctcggcggcggattgctgaccgatatgctacagccggccaccgtggcattcgcgatcccgctatataaatatttccctgttttaaagaaatacgcagtggaaattattttgaatgtggccgtcggttcatgcatcgcgattatttctaccgctcttattgcgaaatggcttcacctcggcaccggcttaattgacagcctcgtcccgagatcagtgacaacgccgatcgcgatgaacgtatctgaaatgatcggcggaatgcctgccgtcacagccgtgtttgtgattttaaccgctttgctcggcacagtgatcggcccgatggtcatccgctatttccgtattgataacgaaatcgcgcggggcgtgctgctcggcacaagcgcacacggagcgggaacgtcaaaggcatttgagctcagctctgtgtccggcacgatttcaagcgtatcgatgatcttagctgcgattatgacgctttgcgcggcgccgtttttactttcatttatgtaaaaaactgtcctctcgagggcagttttttttatgtgcttccccttattgaaaagctcgcaaattacaatataatgtaatttgtggataccaaaggaggcaccctgatgcacaacttgcaggtgaggcggcattacgccgcgttaaaaggattttatttgtttgcttttctcggtacgggcagcatgattcccttactcagtatgtatttaacgaaggaacagcatttaagcggatcacaggtcggcttgatcatgtcactgggcccgattgtgatgattttctttcagccgttttggggcatgctcagcgactatacgcaaaaaacgaaaggcctgctggcggtttgcacatcaatcacaggcatcattggattagcctatattgcatttgacagtttccctctgtttattttgattgcggcctgttttgcagcctttcaaagcacgattattccactttcggacagcatttcactaaggtacacacaagaaacaaatggcaactacggcggaatccgcctgtttggttctctcggcttcggtgtcgcggtgtttgccatgggacaggtgacgaaccagctgtaccccattcacgtgatctttatctttggctgtgcctttctatgcattgctgccatattggcttcacaaatgcccggccagcagaaaacaacaacaaaagtcaatatccgcaaaggattccgggagcttatcagcaacaaaactttcctcatctttatgatcatcacctttacgacatttgctccaaacttagcgaacaatacgtatttcagtctttttctggacaaaagcggcgcgtcactttccgctatcggcattttatttttcatcggtgtcatttcagaaattccatttatgagattcgcccaaacatttatagataaaatggggctgctcaacgtcattatgctgtcaggcggagtctcattattcaggtgggcgctctatttcacggcgccttcactatggatcatttatgtgacggtctttcttcagggagtggccatcggtttatttatcccggcggcgcttcaatatgtgaaaaagattaccccaagacacgttgaagcgacagcactgaccatgtacgccgccatcggcaacgggttcggcaactggttctgcacatttgcaggcgggtatatttttgactacgtatcgattttcgcagtctacttgctttttggcattctgagcatagcaggctttggcctgacattatatttaatgaaggctgaaaaaaacaaacatacacttcatcagccggctgttacttttaaaccataatgactataatgaacaaaagaaaggatgtgcgttatgaacgggcaagagcgaaacagcatttcgaaagggttgcaggttgatattgtattgaaagcagatcaaaaaacaggaaaactgacgagagggacagtgaaggatattttgacgaaatcaagctttcatccgcatggcattaaagtccgtcttgaagatggccgcatcggccgcgtccagcagatcatttctacataaaaaaaagctgcccctgaacagggcagctttttcattattttttctgcagaaggaccactttcaggtagttgccttccggaaatgccgaaatcgttttgaaatcctccggcagcgtaaattcctcaatgatggtgtagcgttcgttcgtttctttaaaggcggcatcgataaagcctttgaatttcttcatgccaaaggcgctgctgtttgtagaggcaacaatgacacccttgtcagcagtgatggcgatcgtttccttcagcaggtttttataatccttggccgcgctgaaggtgcgtttttttgtgcgcgcaaaggaaggcggatcgagaataatcagatcaaagcgcaaatccttttttgcagcatatgaaaaatagttaaacacgtccatcactttaatgtcgtgcgcttcgtaatccagcttgttcacgctgaattgctcgatcgttttggccagacttcggtttgccacgtcgacgcttgttgttttctccgctccgccaagcgccgctgccacggagaatgcacccgtataagaaaatgtatttaaaacggttttcccttttgcatagcggtctctgatcgccttgcgcacatgtctctgatccaaaaagatgcccgtcatggcgccttcattcagatccaccgcgtattgaatgccattctcctggatgatgatcgggaactcgccccttctccctttcacgaagtcatcatcttcaacgtattgtccagccgtgtcgaagcgtttcttctcgtaaatcgctttataatcaagatccagctcatccaatgcggaaatcagcatgtctttaaaggtgtaaattcccttgctgtaccattgaatcagcaggtagccgtcataatagtcgatggtgacgccgccgacaccgtcgccctcaccgttgaacaggcggaaagctgttgtatcttgagcctcaaatagtttggcgcgcgcttgggccgcttttgttaatttggtgagaaaaaatgcctggtcaacctgttcatgtttattgcgggtaagcgtccagccgacccctttgttttgcaggccataatagccccgcgcgagaaactcgccgctctcagacacgatatcaacgaggtctccttctttcatgtgccccgcactccctgcgagagcttctttttcaataaggggatagcctttttttattttggcagcgtgtgctttttttagggtgagtagcttcatatatgtcgtcctctttctgtttgctttctcttatcgtaccacaaaacgccaagatgtctgcattgacagaaaggaaaggtttttctacgatagacaaaaagagtttcgaggaggagcagcatgccaaaacgaattgaccatacaggcatcatggtaagagatattaacgcgtccatcacattttatgaagaggtactcggcatgaaattgaaggatcgcatcacacacacgaacggtgtaatcgagcttgcttttctcggctttgaagacggcccggaaacagaaattgaactgattcaaggctacagcagcgagcttcccgctgaaggaaaagtgcaccacattgccctgctgactgatgacatcgcggctgaatatacaaaagcggaaaaaatgaacgcaaaatttatcgacgaggagatcacaacacttccaaacggataccgttatttctatatcgaaggccctgacggtgagtggattgagttctttcagcggtaaaaaaaaagaacgtacattttgtgatgtacgttctttttttatctataccaactgatatacgttgactcatcgcaaatcatagcttcccagcccatacgctcaaccaattcatggatgtttttatctttggctaaaaagacattaatgaatgagtcatatacactcataaacacaaaatccattttctcatcagttaaaacgagctctgctgcggcttcatcaagaaccgtccgcaagttggcctcagttatgtccaaaacgccgcggttttccacaatcggttctgcgtaataaaaccgattggatccgttcgcacctaatacctttaccaaactcggaatatgaaaatttgaaatatgatcctcactgggataatagaggtctccatttatgttttcatgtaacacctcagccaaatcctctctcgcgaactcgtcccttaaagcgcctatcgacgtcattaaagccagcgccagctcagcatgtgtttgaaagccgcaagaagacataaccttcttccaggaaacagccttgcctattcctcttatttcatcatcgtttggataaatatgctcgtaatcattttttctttttgcattctcccatccttcaggcatttggataaaaggagaaaagataagtgcagcagatgagtattcaactggtacttgttgtaagattggtgattcgtcatctaaccatatataatctagcatgcgcacctcctttacatattctaacattctctttcgtttaaaaggagatgatcagccctatgacaggctgatcatctatcacatcacatttttatccccagattcaaccgcactctcttcccgccatttttgatgatcccatattctgaaaaacggatagtagatggcacaggtgatcagcagattcaccagctgcataacggcgcccgacacctttccgcctgtcgccaggtaacctgatatgagcggcggcatcgtccatggcaccgcgattccggccggtcttgccaccagcccggtgctcatgccgatataagtcgcggtaatcgtgaggagcggtgcgatgataaatgggacaataaggagcggattcatgacaatcggcatgccgaaaatgatcggctcgttgatattaaatagcgcagggccgattcctaatcgtccaagctgcttcatttgtttgctccgggagcgcacaagcatcgtcaggacaagcgccaacgtcgccccgcttccgccgacattgatccaaatttgaaaaaactgagtcgtaaaaatactcggcaacgcctcgcccgcttggaaggcaagacggttggcatccatcgcgccgtaccaaatcggcgccatgattccgccaatgatggaagccccgtgaatcccgcacgaccaaagcagcatctgcacaaattcagcgatcaggcttccgccgagactgccgccaaggatggaaagcggtgtcccaagcaggtctcctacgacattgtgcagactctgaaaaggtgtcatttcaatcaaaaggcgcgccagccacacgagaaacacaatgataaagccgggaatcagcgcgacaaacgatttgcttaccgcaggcggcacaccgtctggcattttgaagacgatatttttttgaataatgtaccgatagatttcggttgaaaacaaggcaatcagcatggcgacaaataagcccttgctgccaagtagcgtgatcgggattccgccccctaccatgatggactccgttgagccatccggtgtaaacggcacctcaaacggcgttgccaatagaaatgcggcaattgaaatcgctccggccgaaagggcatcaacaccatagctttccgccagccgataggcgatcccgaaagcggcgatcatcgccataatatcaaacgaagcattgacgggatatccgagcttatcagcccactccttcccaaacacactcgccatgaaatcagcataccccggaatcggcaggctcgttaaaatcaagaagacagacccgataataatcagcggcatggtcaggataattccgtcacgcaaagcgctgaggtgccgctgtccggcaattttcccggcgacaggcattattttttcttccattacccgagtgaatgcgctcatcttaaaagcccccttttcacattgctttgtgaacaacctccgcaatgttttctttatcttattttgaaaacgtttacaaattcatttggaaaatttcctcttcctgcggaaaaaatctgcattttgccaaacaatcctgtctatgaaaaattttttccttctaactattaatctctcttttttctccgatatatatatcaaacatcatagaaaaaggagatgaatcatgaaaaacatgtcttgcaaacttgttgtatcagtcactctgtttttcagttttctcgccataggccctctcgctcatgcgcaaaacagcagcgagaaagaggttattgtggtttataaaaacaaggccggaaaggaaaccatcctggatagtgatgctgatgttgaacagcagtataagcatcttcccgcggtagcggtcacagcagaccaggagacagtaaaagaattaaagcaggatcctgatattttgtatgtagaaaacaacgtatcatttaccgcagcagacagcacggatttcaaagtgctgtcagacggcactgacacctctgacaactttgagcaatggaaccttgagcccattcaggtgaaacaggcttggaaggcaggactgacaggaaaaaatatcaaaattgccgtcattgacagcgggatctccccccacgatgacctgtcgattgccggcgggtattcagctgtcagttatacctcttcttacaaagatgataacggccacggaacacatgtcgcagggattatcggagccaagcataacggctacggaattgacggcatcgcaccggaagcacaaatatacgcggttaaagcgcttgatcagaacggctcggggatcttcaaagtcttctccaaggaattgactggtcgatcgcaaacgggatggacatcgtcaatatgagccttggcacgacgtcagacagcaaaatccttcatgaggccgtgaacaaagcatatgaacaaggtgttctgcttgttgccgcaagcggtaacgacggaaacggcaagccagtgaattatccggcggcatacagcagtgtcgttgctgtttcagcaacaaacgaaaagaatcagcttgcctccttctcaacaactggagatgaagttgaattttcagcgccggggacaaacatcacaagcacttacttaaaccagtattatgcaacaggaagcggaacatcccaagcgacaccgcacgccgctgccatgtttgctttgttaaaacagcgtgatcctgccgagacaaacgtccagcttcgcgaggaaatgcggagaaatatcgttgatcttggtaccgcaggccgcgatcagcaatttggctacggcttaatccaatataaagcacaggtaacagattcagcgtacgcggcagcagagcaagcggtgaaaaaagcggaacaaacaaaagcacaaaccgaaatcaacaaagcgcgagaactcatcagccagctgccgggctccgacgccaaaactgccctgcaaaaaagactggataaagtacagtcatacagaaatgtaaaagatgcgaaagacaaagtcgcaaaggcagaaaaatataaaacacagcaaaccgttgatacagcacaaactgccatcaacaagctgccaaacggaacagacaaaaagaaccttcaaaaacgcttagaccaagtaaaacgctacatcgcgtcaaagcaagcgaaagacaaagttgcgaaagcggaaaaaagcaaaaagaaaacagatgtggacagcgcacaatcagcaattggcaagctgcctgcaagttcagaaaaaacgtccctgcaaaaacgccttaacaaagtgaagagcaccaatttgaagacggcacagcaatccgtatctgcggctgaaaagaaatcaactgatgcaaatgcggcaaaagcacaatcagccgtcaatcagcttcaagcaggcaaggacaaaacggcattgcaaaaacgattagacaaggtgaagaaaaaggtggcggcggctgaagcaaaaaaagtcgaaactgccaaggcaaaagtgaagaaagcggaaaaagacaaaacaaagaaatcaaagacatccgctcagtctgcagtgaatcaattaaaagcatcccatgaaaaaacaaagctgcaaaaacggctgaacgccgtcaaaccgaaaaagtaaccaaaaacctttaagacttgcattccaggtcttaaaggttttttacattctaagaacatcgtacacaacctttttcccatccgcctcacaggcttttcatactattgctatacagccatgaacagcataaaatgaacgttattacagttatcaccacatatggcgggattgtgactgggcaggcaggcaagacccaatgatgcaaagggagtattaatgcctaaaaagcagggcattttaactcttcttttcgtgttgggctcataacggcgccttggacaaccccctattctcatgctccgtcgtcgcgtcgacgcgggcatttttgtcattttcagccgatatttctcacttttttcattttgattgtcaacttttcatttgatacgatgaacaagccgacttttcttcagcaaaggaggttttgattgcttgcataaagagattgcaaaagaattactgctgctcgcaggaggaaaaaacaatattatcagcatcagccattgtacgacccgtcttcgttttgatgtaaaggacgagacgaaaattgatatacatgccattgagaacctgcaaggtgtgcagggcacctttttccgttatgggcttttccagattatcttcggagcaggcgtcgtcaacaaaatatataaagaagtcgttcatgtatgggagaacgcgccttctgaagaacctgtccaccagaaaaaagccagccggaagctgaaccctgccgcagcttttgcgaaaacactgtccgatatttttgtgccgattattccggcaataacagcaagcggcctgctcatggggctgatcggcatgattaaggtgtttcactggttcgctgccggcagcccatggattaaaatgctcgacctcgtgtccagcacagcctttattttactgccgattttagtcggcttcagtgccgcacggcaatttggcagcaacccatacctaggggcagtgatcgcggggcttttgacgcatcctgatctgctggacccgtctatgctcggcagcaaaaccccgtcttctttagacatatgggggcttcatatcccaatgatgggctatcagggttccatgataccgattcttctttccgtttttgtcatgagcaaaattgagaagctattaaaatcgattgtgccgaagtcgcttgatgtcgtgatcattccctttattacggtcatggtgacaggatgcctcgcgctgattgtgatgaatcccgccgcgtccatcatcggccagatcatgacacaatcgatcgtctatatttatgatcacgccggcattgccgccggagctcttttcggcggcatctactccaccatcgtcctatctggattgcatcatagcttttatgcaattgaggcaacgctgcttgctaatccgcatgtcggtgtcaactttttagtgccgatatggtcgatggcgaatgtggcccaaggcggagcggggcttgcggtattcctcaaaacgaaacaatcaagcctgaaaaaaattgcgctccccgcttctctgaccgcgtttttaggcattgttgagccgattgtattcggggtaaatctcaaattgatccgtccctttatcggagcagccatcggcggtgctattggcggagcatacgtggttgcggtacaagttgtggcaaattcctacgggctgacaggcattccgatgatttcaatcgtgctgccgtttggcgccgctaattttgttcattatatgatcggtttcttgatcgcagccgtctctgcttttatagctacattgtttctcgggtttaaagaagagacagaataactggatttattcgttttcattcataaaacgggggatgaaaggacaaaaaagctatgaaaattaaaagaatcttaaatcataatgctatcgtcgtaaaggatcaaaatgaagagaagattctcttgggtgcaggaattgcgtttaacaaaaagaagaatgatattgtcgatccgtcaaaaatagaaaaaacctttatcagaaaagatacacctgactataagcagttcgaagagattttagaaacattgcctgaagaccacattcagatttctgagcaaattatctctcatgccgaaaaagagctgaacatcaaaatcaacgagcgcattcatgtcgctttttcagaccatctttcttttgcgattgaacgcctgagcaatgggatggttatcaaaaatccgctgctgaatgaaatcaaagtcctttatccaaaggagttccagatcggcttatgggccagaacactgattaaagataaactggggattcacattcctgatgatgaaatcggcaatatcgccatgcatatccacacagcaagaaacaatgccggcgatatgacacaaacgcttgatattacaacaatgatccgtgatattatcgagattatcgaaattcaactgtctattaatatcgttgaagataccatctcttatgaacggctcgtgacccatctccgctttgccattcagcatatcaaagcaggcgaatccatttacgagttggacgcagaaatgatcgacatcattaaagagaagtttaaggatgccttcctgtgtgccctaagcatcggcacctttgtgaagaaggaatacggctttgagtttcctgaaaaagaattgtgctacatcgccatgcatattcagcggttctaccaacggtcagtcgcacgctgagacaaacaaaaaacgcttttgatcatctcaaaagcgtttttttatatctgtattattggttgatcgccgggttgctgatcgtattccacttcgtataggacatgtaatggaaatactcatcgcgatacggatgttttgtattggagttccaaggcttttctccgccgcagaagtgcacgattgccgggttttctctcgtttcattatattgcttccgccctaacagagtcgatggggttttcagctttaacatgatataggtttgagcgttccagcgcggatgaagttcataccactgatcatataaaatcgcattcagtgcatcttggtcatgcagcacaagaaagtcttcgtctgggtgttcattgataaagttgatgactttttctgtgatgttttgctttctccaagactcaaaatcaataatcatgatacctgagttaaaatacttccctgtatcagtgacgttcatttctttcaggcgttcatgctgccccgcatcctcaacagcggctacggtgtatggcgcaatgtctaagtcccatagcttagaaatatcctctaggacaagcgcatcacaatcgatgtaaatcattcgtttgatgctttcatccttaattaagtcgggaatcgaaatgcggtaatacgcggcttttgtaatatggctgctctctaccgcatgttcatacattttggtatccacttctaaaaactcaatcggcactccgaatttcaaagtggtttcttccagtctttttttgttatcaggcttaattccgccatcaatgacgtataattttacctctctctcctgatccatgttagtcaataaagaaacgaacatcccacctaaatgacgagcataattatcatctgcgcatgatacgatatgcatgatttcatctttcctcaatggtattcatctccctttttgttgtacaagttacataccctttttcaaaaaaataaacacgttctccgacatttttttaaacagaatgtgtgatacaacaaaaaaggtgtcattttttgaagatgcgataaagccagtaaagaatgaaaaagcttgcgattgtgatggcttcagccgagacgatataccacggccatggcccgagaacatctaagagagaggatccgcccggttttttcgtcaaatacatataattcgcgccaagccagcgatcaatcaggaaaatacagacgccgtacacattaacaagcaggactgtcacccataacgagcgctggcccattctgtaggtgccaatcacagccatcagcagacaggataaaaacacagacccgtgagaaataaaaaagaggatatatcggatatgcggaaatgaaaacattccgaggtcaggagtggcaagagcctgaatcgaactgccgatgccgacaaaaaacaaaaacacaaacagctttctgctttttgtcactaacataatagctgacaaatacaccgacaggtcactaagctggagaggcaatgaagtgcgcaccgaccacctgcccgtggcgaccaaccatatttgatagccgatttgcgaaccaagcaaaagaaacacaaacagagaacgcaaaaaccggctggccctcggctgcttgaccccctcttggaacaaaaccaacagaatggccaaaagggcgataatcgctaacgtcactacatgctctgtcgaaaacagatgaaacggatcatgcttatagacggattgaacatatttttgcaaaactgcacccccgtttgcggttttttgtttattttggcgttgtttgggctttttttattcaaccgatatatgggcttgaagttcacatcatcctctgttacaattcgtttcatagctaatgattctgataatttaaggcaggtctaaaaaatggaacgttcacatcaacatcagcagcttcggaaggaagaacacgatacactttctaagctcaaacaaatgcccgtcgagtcactcaacctggaagccatttcgatcgctacgaatctgtatcggtctgcacaaaggctccgtgtcaaaatggagactgaggttctttcttcctataacctttcttggaccgctttctccattctttatgatctatgggtatggggagcgctcgaaacgagaaaaatcgctgagctgtcagggatatctacagctacagcaagcaacgtgatcaaaacgctcgaaaaaaagagtttttgccgtaaaagcatcgacacaagagatcggcgactcgtgtttgtctcaatcaccgattccggcaaacaagcgatcgaagaactctacccggagtttcacaaaggggaaacagagctcattgcgggaatgacgaaggacgaacagaaaatattgacagggctgcttagaaaggtagctgacaatcttcatacaacataagctttgacgggaatccagtagcggtttgtctccctgtttcagagagccggcggaaggtgcgagccggcacacagcaaacgtgaattacctccccgagctttctttgtgaccttaaaagtagcaaagaacgggaaaccgttattcgaatgagcggaagacgatgtcttcaaccagggtggtaccgcgtgcattgagccacgtcccttatcgggatgggctcttttttgtgtttgtaaaaaaggaggaaaaatgatgaaaacatttgagcagctcacagcgtcacagcaaaaagaggtagaaagacagcttcagctatacatgacaggcgcccacgaagtcataccgccggaggaattaaaggcaaagctcgtgaaatcaatttccacgggcacgccgcttaaaattaagctcggattagatccgtctgcaccggatgtacatttgggccatacggttgtgttaaataagcttcgccaatttcaagaaaacggccacattgtccagctgttaattggggatttcacaggaaaaattggtgatccgaccggaaaatcggcagccagaaagcaactgactgatgaagaagttcagcacaatgccaaaacctactttgagcaattcggaaaagtgcttgatccagaaaaagtcgagcttcactataactcaaaatggctgaaaacattgaatctggaagatgtcattgaattagcagggaaaataacggtagcccgcctgatggagcgcgacgactttgaagaacgcatcgccatgcaaaaaccaatctcactgcatgaattcttttacccattgatgcagggatatgattctgtcgttctcgaaagtgatattgaattaggcggaacggatcagcatttcaatgttctcatgggacggcatttccaagaacgatacaacaaagaaaaacaagtcgtcatccttatgccgctcttggaaggcttggatggcgtcgagaaaatgtcgaagtcgaaacacaactacattggcattaacgaacatccaaacgacatgtacggaaaaacgatgtcactgcccgacagcctgatgaaaaaatacatccacttggcgacagacttagagcttgaagaaaaaaaacagctcgtaaaagacttagaaaccggcgcagttcatccgcgtgatgccaaaatgcttttagccaaaacaatcgtccgaatgtatcacggagagaaagcagcagaagctgccgaacactcgtttaaaacagtctttcaggaaaacagcctgccggaagatataccggccataaactggaaaggtgaaaaaacgatagcgatgattgatctgctcgtcaagctaaagctcctctcttcgaagagcgaggcgcgccgcatgattcaaaacggcggtgtacgcatcgacggagagaaagtaacagatgttcacgccaaagcagagataagagagaatatgatcatccaagtcggcaaacgcaagtttttaaagctccaatagtctgatattccgaaacgcttatgacccttcattcataagcgtttttttgcaggtataaagcagtcttttcaaaaacgctctccatcttgcaggaaactcctttagcatcccgaaatattccccaaccatacatttaggggaggtttatttttgatgaaaaagcttttgactgtcatgacgatggctgttttaactgccggcacactgctcttgccggcacagagtgtcacccctgccgcgcacgctgtacaaatatcaaatagcgagcgcgagcttccattcaaagcaaagcatgcgtactctaccatttctcagctaagtgaagcaatcggccccagaatagccggaactgcagctgaaaaaaagagtgccctattgatcgcctcatcaatgagaaaattaaagcttgatgtgaaggttcaacgattcaacattcctgaccggcttgagggaacactgtcttcagcaggacgcgatattcttctccaagcggcatccggctcagctccgactgaagagaaaggactgacggccccgctttacaatgcgggattgggctatcaaaaggactttaccgctgacgtcaagggcaaaatcgccttgatttccagaggagacctgacttattacgagaaagccaaaaatgccgaagccgccggagcgaaagctgtcatcatttataacaacaaagaaagcctcgtgcctatgacgccaaacctgtcgggaaataaagtcggtattccggtcgtcggcattatgaaagaagacggcgaagcacttacccagcaaaaagaagccaccttaaaactaaaagcattcacaaaccaaacctcccagaatatcatcggaatcaaaaaaccaaagaacatcaaacatccagacattgtgtacgtgacggcccattacgacagtgttcctttttcgcccggagcaaatgacaacggctcaggtacctctgttatgctggagatggcgcgtgtcttaaaaagcgttccatctgataaagaaatccgctttatcgctttcggcgccgaagagctcggcctgctcggctcctctcactatgtagatcatctatcggaaaaagagctgaaacgaagtgaagtgaacttcaacttagacatggtaggcacaagctgggaaaaagcgtctgagctgtatgtcaacacattggatggccaatctaactatgtttgggaatccagtcatacggctgctgaaaaaattggatttgacagcctgtctctgacacagggaggatcatctgatcatgtgccattccacgaagccggcattgattccgccaactttatttggggagacccggaaacagaagaagttgagccgtggtatcatacccctgaagactcgatcgaacatatcagcaaagaacgcctccagcaagcaggcgatcttgtgacagccgctgtctatgaggctgtgaaaaaagagaagaaaccgaaaaccattaagaaacaaatgaaggcgaaagcatctgacatttttgaagatatcaaataaaaaaagacggcacttgggtgccgtcttttttttataatgatcagctgtttagccgtctataagtaaagctttcagtttatcaactgtattttctttttctaacgggcgataaatggtcagtttcaaatcaggagagtcatatatttgtaatgtcatatgctccatcaccattgttccggctgccgggtgatgaagtactttttctcctgcgtgtgtgcctaatacttcgtggtggttccaccattttttaaattccgggcttctttcagttaactcatcgatcagctcttttatccatgcttccccaagaaaccggctggctgtcgatcgaaactgtgcgataagttttttggcgtggctttcccagtcgtcaagcagatcccgatactccttcgaggtgaaacatcgccatatggcattcctttccttactgcccatttggccaaaattgccgaacacagcacaagctgctgtgttccaagcaataacgtcccacttttcgtcagtcacataaacagggcaattggttaaatgatcaataaagtgccgcacagccagaggaaggctcttattatcttcatcctgatcatctaaaggaacatgatggccagccaacagaaagacatgacgcttttcctcataattcaatttgagcactctcgatatgctttccagtacctgtgttgatacccgaatatcccttccctgctccagccatgtgtaccatgtgacacctataccggacagctgggctaattcctctcttctcaagcctgttgttttccttctggtacccataggcaatccaaactcttgcggagaaagctgtgcccttttcagttttaaaaactcccctagctctttccgtttttctgccatactgtccacatacacactctccttttgcatagaatttcctattagtattctacataaaaaggagaaggtttttatattatttgtttcgttctccaaatacttcagcggccacaggaagaatggtattcagtgcattcggaaaacctgagtaaataatcatctgcatcatgacttctatgagttcttcttgtgtccatccgacattcagggctccgttaatatagaattttagctgctgggtattgcccaatgcagtcaatccagcaacggttgctaataatctggatttcagatcaagacctggtcttgaaaaaatctgaccgtagttaaactccacggcaagcacaccaaggtccggagcgatggaatgtttaaaattgtccacgatcgcttcatagttctcctcatcaatttgtttcagaatatctaacccttttttataacgttcacttgttcgcatcagcttctatctcccttccaatatcgcttttttagtagtacggtttatggtaatccttgaactgaaggcaataccgaccatgatcatccccaggatacaaacaccgttccaatgaaacagcatccagaccgcaccccctgcatacgatcccaaggcgccgcctaaaaacgtgctgaccataaagaggccattcaatctgctcctcatttcagccgacaattggaaaatctccgcctgacacgccacctgattcgcctgaatgcccatggtgatgaataaagcgcccaatacaatcacaatcaatgaagtctggcctgccattaataaaacaaatgacaataaggtaaaagacatacaaagcttgttggaaaaagcagctcctttttgatcaataatccggccgatcagcggagttgcaaaagccccgccaattcccaccaaaccgattgttccggcagtctggctgccaaacgagaatggaggttcactcaccataaacactaacgtcgtccaaaataaactgaaggcgccgaacatgaagccttggtttacacatgcttttcttaacactttctccttgatcaaaagcggaaataatgaagaaatgagttttccgtaatgaaatgcatgtgtccctttgcttttcggaaagcagaagtgaatgatcaacataatgatgacggctgctgcacaggcaatccaatacatcacgcgccagccataatgggcatctatcgccccgctgaccactctcgcccctaaaattccgcaaaccaagccgatagctacgtttccgagtacttttcctctgttcctgtcatttgctaaacctgccgcaaacggcacaaggatttgaggaataatcgtgaagaatcccaataataaatttgtgatgactagccatggaaagcttacagctaacgctgaagctgccgaacaaacccccactaagaatagcaggctcacaattaagcggcggcgttcaaaaagatctcccaatggaacaagcagaaggttccccgccgcatagccaatctgcgccaatgtagcaatcattccagcttgtgccggcgtcatatgaaacgtgcctgccatgctgacaagcaatgtttgattgatatagacattggctaccgtaaacccgctagtcaccgcgataagaaaaatcaaacctctcgataatgaaatggaatggttcatgtttacctcctttcttcatgcatgataaagcaggttcaatcatggaaacagaagtgagtttatactggtataaaaagtactagcaagcaaagcaaaaaagcgaaaccctgtcaggcttcgcttttgttatcaatccacttctttcttaatccccagcattttctcatctaggtaatgggcaatctccgcggcttccttcagctcatctgttaattgcttaggaacgtcattgttcaatttatagtaaattttatgttcaaggctcgcccagaaatccatcgcgattgtccggatttgaatttctgctttgacgtattccacacggttcgttaaattcacaggcatctcaatgattaaatgcaggcttcgatagccattcggtttgggtgtctggatataatcctttacctttacgattctcaaatcttcatgctgcttcaacacattcacgacattataaatgtcagaaataaaggaacagatgatgcgcacgccggcaatgtcgtgaatatgctccttcatttccttcgtcgtaatctcacagccctttctcattaacttattcacgatgctttcaaagcttttgacacgggattttgtatgttcaatcgggttgtgtccgtgaatgaggttatattcctggctgataattgagaactttgtatcgagcgcatctagcgcaaatttataaactaataattcatttttccaatcttccattactgtttttaaatcgtccatatgtgttacagataaatccattttcgtcatctcctttaacggaactttatccgctgtccatgtactagacgtccctgtctgctgcaaggttctatgaatttttttacaaaatgcggtcgattgtaacaaaaaaagaccgcacgaaacgagcggtcttttttattatcggaaatagctgatcaataatccgatcgagagcaggaatccgaaaaatgtatttgtttgggctgttgatttcattgcgacaatcatattcatcggcatttcgttctggacgaaacccttcactgcctgaaccggcttaggcacgctcaaaaagacgacaaacagccatgggcttgcggcaccggtaataaccaagccgacaacccagatataagcgacggcaaacgacgcagctaacagagtaacagctcccttatgccccatcaaaatcgccaatgttttgcgtccgccttttttgtcctcttcaatatcacgaatgttgttcgacaggttaatcgcgccgacaagaatcgcaatcgggatggaaatcaaaatgctttgcgtgttgatcatatctgtctgaatgaaaaacgaaatcagcacaaacaccgaacccatgcaaatgcctgagaataattcaccgaacggcgtgtacgcaatcggcagcggcccgcctgtatacaggtagccgatcgccatgccgacaaggccgatcagtgcaagccaccagctgctgcttgcacaaatatagacaccgagcaaaatggcaatcccgtatgaggcaagagctaattgcaaaatcgttttaggcttcattccgtggcgtacaattgcccctccgattccgactgattctgctgtatctaatccgcgtttaaaatcatagtattcattaaataagttcgtcgcgatctggatccataggcaagaaaacagcatagccaaaaacagcagcagatcaaccttcacataaaacatcgccaaaacggttccgagcagcacaggcacaaacgatgcggttaacgtatgaggacgggttaactgccaaaggatctgccccatgctttctttttgcggcgctgtctgaccctcacccttatttgtttggttcatcttcctcttcctttctattaaaaggcttactttttttcagccggcagcttaataaaaaactccttttgcttccttatctatcataatgacttctcccttatttcacaagataccgcaagaaggcgttttctttcttattatacgcttctcgccctgatttcattaggtttctgctttcacttgaacgaacaggtacagaaaaatttttttaagtacattacactttttaaaagttaaaaagatcttttgactccagctatcttttcctttattatgaatcagctcgaaacattccattcttgcccttgcaggtataaagattcattttcaaaaacatacgccgatatattaatttgagggagattagggaaaaaatgaaactttttgagcatctgatcgtcaaataatcatgtgattgtcgaaaaaacgggaagggaatttttgatatgctgcaattaatgaaacagctgtatgaaaaacccgctgtcaagtggacatgtcatacaggcttttatttgatgatactgcttgttttgttttttatgtatggttttcacaccgcgaataccggttcatatatttataacgatttctaattggagagagaataactatgaaacttttacatgctattcaaacacatgcggaaacttatccgcaaaccgatgccttccgctctcaaggccagtcgctcacgtatcaggaattatgggagcagtctgaccgcgcggctgccgcgatccaaaaacgcatttctggggaaaagaaatctcctatccttgtgtacggccacatggagccgcacatgcttgtttccttcttgggaagtgtcaaagcgggacatccttatattccggttgacctgtccattccgtccgaacggattgcgaaaattatcgaaagctctggagcagaattgctgatccatgcagcaggactctcaattgatgcagtcggccagcagattcagacagtttctgcggaagaactgctggaaaacgaaggcggctctgtcagccaagatcaatgggtcaaagaacacgaaacgttttatatcatttacacttccggaagcacaggaaatccgaaaggcgtgcagatttccgctgcgaaccttcaaagcttcacagactggatttgtgcagactttccagtcagcggaggaaaaatatttttaaaccaagcaccgttctcatttgatttgtctgtcatggacctatatccgtgccttcaatcaggcgggactttacattgcgtgacaaaggatgctgtgaacaagccgaaagtcttatttgaagagctgaagaagtccgggctgaatgtgtggacatcaacaccttcctttgtgcaaatgtgcctgatggatccaggtttttcacaggatctgctgcctcatgcggacacatttatgttttgcggagaggttcttccggtttctgtggcaaaagcgctgcttgagcgttttccgaaagcgaagatttttaatacgtacggcccgactgaagcgacagtggctgtcacatcggttgaaattacggctgacgtcatcagccgcagcgaatcgcttccagtgggcttcgccaaaccagatatgaacattttcattatggatgaacagggacagccgcttcctgatggagaaaaaggagaaatcgtcattgcagggccgagtgtaagccgaggctaccttggtgagccagagctgacggaaaaagcgtttttctctcatgaaggccagtgggcataccgaactggcgatgccggctttattcaagacggtcagattttctgccaaggacgtttggattttcagattaaacttcacggctatcggatggagctggaggaaatcgagttccatgtcagacagtcacagtacgttcgctctgctgtcgtgattccttatcagccaaacggaacagttgagtacctgatcgctgctattgtgcctgaggagcatgagttcgagaaggaattccagctgacaagcgctattaaaaaagagcttgccgcttctcttccggcatatatgatcccgagaaaatttatctatcaggatcacattcaaatgacggctaacggcaaaattgaccgaaaacgcattggcgaagaggttcttgtatgacgccttacagctcgtttttattctttatactgcttggcattcttcttctgccgacgatcattctcggcttaaacggaaaaagatttcaagcatacaacatgttcatatctatcattatattggctttaattttttcgcatgacttacacggggtcatcgcgctgtgcctgtttacaatatggcaggtgctcctgatcagcggctatctggcataccggcagaaagcgaacagcggctttgtcttttgcggggctgttatcgcgtctattctgcctttatttctgtcaaaaatatggccgtttctttcacacccgcagccgcatcatccgccgcataacctgatcagctttttagggatttcatatttaacctttaaaggcgttcagctgattatggaagcaagagacggactgctgaaagaacagctgccattgcaccgcctgctgtatttcatcctgtttttcccgacgatttcctccggcccgatcgacagataccgccggttcgtcaaggatgaacagaaggcttggacgaaagaagaatacgccgacctgttgtatacgggaatccataaaatcttcatcggtttcctgtataaatttattatcggctacgcgatcaatacgtacttcatcatgaatcttcccgcaatcacgcacaataagattcttgggaacctgctgtacatgtacggctacagcatgtatttattctttgatttcgccggctacacgatgtttgccgtcggggtcagctacattatgggcattaaatcaccagaaaactttaataaaccatttatcagtaaaaatattaaagatttctggaatcgctggcatatgtctctgtcattttggttcagagattatgtgtttatgagattcgtattttggatgactaagaaaaagtggatcaaaaaccgtatggccgtctcaaacatcgggtatttcctgctgtttatgctgatgggggtttggcacgggctcgcgccgcaatatatcatttacggcctctatcacgccgtgctgatgacgtgttacaactttttcgagaagtggaataagaaatataaatggctgccgtccaaccgctggacaaccattctcgctattgtgatcacattccatttcgtttgcttcgggttttacattttctcaggaaaaccatttcatcaccaccattaaaggagattagaaagctatggattttaaacaagaggtattagacgttttagcagaggtttgccaggatgacatcgtaaaggaaaatcctgatattgaaatttttgaagaaggtttgcttgattcttttggaacagtagaattgctgcttgcgattgaaaaccgttttggtattttagtgccgatcactgaatttgaccgggacgtttggaatacacctaacaacattgtaaatcagctgtctgagttgaaataatgaaaaagcgttttttcggtccaattattttggcgtttattctattcgcaggcgccatcgcaattccatcttcatggctgacaggcttcatcaccgataagcgtgtgaaagagtcagcaacagccttgaatccgagtatgtttcaagggctatatttacaagatcagatgctcaaagatccgacatatcttccgatttacgggtcttctgagctttctcggctggacgagttccacccatctaattattttcaggtaaacaatgagggattcacgccataccttgtcggcaaaggcggatcccagtcattgattcattctttaaacttcgctgcccatatggatcagctgaagggcaaaaaaatcgtattcatcgtgtctccgcaatggtttattaagcgcgggtctgatgaacagcatttcgcgccgaactattctgcgctgcaagggcttgatttggcatttaacgatcagatcgatcctgaaattaaaaagaaaatgatgaaacgcatgctgcgctttaaggctgtgcaaaacgatgccattctttctgagctgtacaaagcaatggtaaacggccagacgtggaaagtgaacgcgctgaagccggcggcgaaagtgtattacagcatgctggaaaagaaagatctgtattattcaacgacagaatcatccgggccaaagcgctatatctcgcagtcagtaaaggataagtcatggtctgaattgaataaactggcggatcaatcgggcaaacgccactccggttctaacgattttcacatcgacaaccctgtctataaaaagctgaagccgaaagtgcctaagctgaaagggaaaaacaaaggaagatcgtatgcggtgtcaccggaatatggcgactttgaaatgatgctcgatatcctgaaggatgcgggcgcagagcctatgtttgtcaccattcctgttaacgggaaatggtacgattacacgggcttcccgaaaaaaggacgcactgactattacaaaaaggtaaataaacaaatcagagcgaagggcttccaggttgctgatttctcagggcatgaatatgacccgtatttcatgaaagacaccattcacatcggctggaaaggctgggtgtatgtcgataaagcaattgacgaattttataaaaccggaaaagtcacttcatcctgagcatctcataggacgcggctgcatatttcctgctaagatttgaaatagtaaagaaatcacagccaacttaattaagaggtgttacatccaatgaagatgacaggcaatacggttttaatcacagggggttctgctggcatcgggcttgaactggccaagcgcctgctggaacttggcaatgaagttatcatttgcggacgcagcgaagcacgtcttgcagaagcgaagcagcagctcccaaacatccatacaaagcaatgtgatgttgcagaccgttcgcagcgggaagcattgtatgaatgggctttaaaggaatatccgaacttgaatgttctcgtcaacaacgccggcattcaaaaggaaattgactttaaaaaagggacagaggatctttttgtggacggtgatgaaattgaacttaatttccaagcgcctgtccatttatccgcccttttcacacctcatttgatgaagcagcctgaagcggcaatcgttcaggtcacatccgggcttgcgtttaacccgttagctgtttatccggtgtactgcgcaacaaaagcggcacttcactcgttctcgcttacgctcagacaccagctccgcgacacgagcgtggaagtgattgaaatggcaccgcctatggtggacacgggcttaaaccaaaaatcacgcgataaacaaggcctgacgtaccggggcatttcatctgaagaatatgttcaatatttcttggacggcttgaaggaaggcaaacaggagattacaaatgaacgggttgaaggtcttcgggatgccactcgcgccgattatgacaggttattcaagcaaatgaacacgcaggagaattaatttctcctgcttttttcatatgaatttcttacaaatttgagcaaacctattgcgattatttgttgaaggtatacaatagaatataattattttcaaataagtttgataatataaacaatttaacagcagggagattgaccatgactaaacaaacaattcgcgttgaattgacatcaacaaaaaaaccgaaaccagacccaaatcagctttcgttcggaagagtgtttacagaccacatgtttgtaatggactatgccgcagataaaggttggtacgatccaagaatcattccttatcagcccttatcaatggatccggccgcaatggtctatcactacggccaaaccgtgtttgaagggttaaaggcttacgtgtcagaggatgaccatgttctgcttttcagaccggaaaaaaatatggaacgcttgaatcaatcaaacgaccgcctctgcatcccgcaaattgatgaagaacaggttcttgaaggcttaaagcagcttgtcgcaattgataaagactggattccaaatgcggagggcacgtccctatacatccgtccgttcatcatcgcaaccgagcctttccttggtgttgcggcatctcatacgtataagctcttgatcattctttctccggtcggctcttattacaaagaaggcattaagccggtcaaaatcgctgttgaaagtgaatttgtccgtgcggtaaaaggcggaacaggaaatgccaaaaccgcaggaaactatgcttcaagcttaaaagcgcagcaggtcgccgaagagaaaggattttcccaagtgctttggctggacggcattgagaagaaatacatcgaagaagttggaagcatgaacatcttcttcaaaatcaacggtgaaatcgtaacgccgatgctgaacggaagcatcctggaaggcattacgcgcaattcagtcatcgccttgcttaagcattggggctttcaagtttcagaacggaaaattgcgatcgatgaggtcatccaagcccataaagatggcatcctggaagaagccttcggaacaggtacagcagctgttatttccccagttggcgagctgatctggcaggatgaaacactttcgatcaacaacggtgaaacaggggaaatcgcaaaaaaactatatgacacgattacaggcattcaaaaaggcgctgtcgcagacgaattcggatggacgaccgaagtcgcagcgctgactgaaagcaagtaagaaaaagccggcccagtacaggccggctttttttacgcttcaattttgttgaaaaactgcggcagatacgctttgtgcgcctccagcatttcatctaaaatctgtttggccacagtatcggacgggacaagagggttaatcgtcatggcaaggagcgcagtttgatagtcacctgtaactgccgcttctgccgcgacacgttcaaaggatttgatttgctggacaaggccgcggacagacaccggcaagtcgccgacagcaattggcttagggccagttttcgtcatcacacagttcacttcaactgcggaatcgtctggaatactcgctattgcaccgttattgatcgtgttcaccggctgaatgtcgtgtttatcattgtaaatcgagctgattaagttacatgctgcatcactgtagtaagctccgccccgtttttccagctgcggcggtttgatcgcaaggtttggatctttataaagctcgaacagctctttttcgaccttctgtacgacttcagcgcgggtgccctccatttgtgatgcttccagttcgtgctccagcatctcttttgttttgaaatagtaacggtgatagccgcaagggatgacattgagcgcttttaagaaatccggttcccattcggcgcctgagatatttttcatcgtcatcgcgtttttcgggtcgcccatcgcctcgatgacttgctccttcacacttacgccatccaagaaaacatccagcccaaataccatatggttcagtccggcgaattggacttctacgcggtccacatctacatcaagcgctttggctacgcccattttgatgccgattggaacattacagagaccgacgactttcttcaggttggagtagcgaagcaaggcttctgttaccatgccggcagggtttgtgaagttaacaagccaagcgttcgggcaaagctcttctatgtcctttgcgatctcaaggatgaccggaattgtgcgcaatcctttaaacaggcctcccgggccgtttgtttcctggccaatcactccgtattttagcggaatgcgctcatcctttgctcttgcctgcaaaagtccgacacggaattgggtcgtgacaaagtctgcgtctttcagcgcttttctccggtcgagcgtaagatgaatgtcgatcgggacgccagctttttcaaccatccgtttggcgagtgtgccgacaatattcagcttttcttcgccctcggggatatcgacgagccataattcgcgcacaggcagctcatcataccgtttaataaacccttccactagctcgggcgtatagcttgaacctccgccaatcgttacaatcttcaatccttttgtcatatgcttgctcccctttgctcggtgattttttcatataactcaatgatctctgcagccatatccttcactgtcattgcattcattaaatgatcctgtgcatgaaccatcagaagcgtcatttccgtcttttctccgctcgcttcattttggatcagctctgtctgataatgatgggcttttgacaattcttcagcagcgtcttgaagctttttccgcgcttcttctgcgtcaccgcttttcgcagcggcaatggcctccattgcggagctcctaccgtttcctccgtgaaggatgatttgaaaaatgatttgttccatttcctcattcacgcgattcacttcctttctctacagagccgcttctttgtcatctgatgctgcaggcgtttggaccagctccagatcgttttcttctttcagcttctgcttatcccacattctgaagaatggatagtagacaacaaaggacacggcaatattaatggcttgcatgaccgcacctgagacttttcctcctgtcgccaagtagcctgaaaagatcggcggcatggtccacggcactgcgatacccgccggttttgcgacaaggccggtgctcattccgatgtacgtaagtgtcactgtgacaagcggtgtgatgataaacggaagtaagagcattgggttcatgacgatcggcattccgaatataatcggttcgttaatattgaagatggccggtccgaccgcaagcttcccgagctgcttcatttgtttgcttcgggcgcgcaggaacatcgtgacaaccagtgccaatgtggcgccgcttccgccgatattgacccagatatcgaaaaattgctgggtgaaaatcttaggaagctcctcaccggcttggaaggcgatccggttggcatccattgcgccgtaccaaatcggtgccatgacgccgccgacaatgtttgcaccgtgaaggccgcaggcccataaaagcattttgacggcttcggcgacaaggcttcctccaaggcttcctcccagaatggaaagcggagtccccaataaaacgcttacaatattatgaaggctttcaaacggtgtcgcttcaacaatcagccgggctgcccaaatcaggaagatgacggcaaagccggggattaacgcgacaaatgacttgcttaccgccggcggaacaccgtccggcattttgaagactaaattgcgctggataatgaggcggtaaatctctgtggacaccattgcgataatcatggcgacaaacaggcctttgcttcccatgagcgaaagcggaatcccgccgccaaccatgatttctttcgtcgcgccatccggcataaacggcacttgataaggtgttgctaataaaaatgccgcaagggaaatggctccggccgacaaggcatcaacgccgtatttctcggcgagccggtaggcgatgccgaacgcggcgacaagacccataatttcaaaggtcgcgtcgactgggtaggccagtttttcagaccaggagctgccaaacgtttttgccataaactcagcgtatcccgggatcgggaggttgccaatgatgaggaaaaaggaaccgatgataatcaggggcatcgtgaggataataccatcacgcagcgcctgcaaatgacgctgtcccgcaattcttcccgctataggcatgaccttttcttctaagatctgattgactttattcacatagcccgcccctctctatgacacatgtccaagctgttcagctgatttcagcacttccgccccgttgcacgtgccataatggacggtattaatgacgtctaccggaaccccctttgactctcctaattttttgagctgcggaagcatgtaacggacttgcggaccgagaagcaatacatccgctttatcgatatgattttgtacagaatcgcctgaaactgcccaaatggtatagtcttttccctgttcctgcgcacttttttccatcttgctcaccagtaaactagtagacatgcctgctgcacaaacgagtaatatattcatgtaaaagaccccctagagtttgatcaattttgtaatgtcctgctgttgctatcatcatattatgaaatcgctttcataaacactcagggtttttccgcaggcaacggaaaaaaggtatatacaggctgtcagctcagcattttttggtcaaacacatccgaaagctcttgaaatgaacggcatttgaccagctggttcaccgccgccgggtcatccaaaatgctgccaagcagtttatacatgctttgcaagtccgctttgttctccttttcgacacaaagcagacagacaaattgaactcgctgactctcccaatcgatcggttttttgagcgtacaaacggcccaaaacgttgttttcgtctgcggaacaagcgggtgcgggatggcaacaagattgccaaaacacgttggcgacatgtcttctctttcaaaaatggaatctatgatttcttcatcggcaaagccgcattcgaccgctttctgccctaaaaattgaatcacttcttcttttgagcgcagatcctcctgaaaaaaaacgagttctttttttaggtagcgattggctttttccttttcatcactcagaatagattctatttttgtaaagtcagttccgcctaagatggtgttaaccttcagtactggtacagggagctcttttttaatcggaatggtactgatgacaaaatcaattgattcgtaggacatttgatcaagactataatactcagccgttccaagaatatcgagccgcttgccgaaatgggaacgcagtttttcgcgcagaagctgggcgcttccggcacccgatgcgcatacaatgatacagcgtttcggcggactttctgttttttttcgttcaatcgcggcgccaaagtggagagccaaatatccaatttcgttttcatgaatctcaatacccgtttgttcctttatcacgattccggcaatgatcccggcttcaaaagcgagtggataatgttccttgatcgctgccagcatcggatttcgaagattcatgccgtatcggttgcggctgatcgccggcttcatatgcagggccaagccgattttcagctctttgtcatgcaggatgccaagcttcagttcacgatcaacagctttgatcatggcaagtgtcagctgatcggtttcctcttctattgaaaatgtgtcctctccgcattgtgattgtgtcattcgttttgtgccaaggagatgcatggtgatgtaggccgtctcgtctttcggaaacgtaacggcaagctttgattccagctcttttacgatggcttctgcagcctggtactccttttgatgcaggatatgatccatatctttcgggaaaagagaaacatagttttccgttctgatccgtttacaggcgatagcgatatggataatgaggttattcagtcccatgttggacagagggatgcggtcgtttttcatttttttcaagatggcggaacggatgatctcaatttcttcttttggcaaaatatcagccttttcatttaaaacatctatctccgtttctctttcatcaacaatgtactccgccatgcagtacctcatctgcacctcgtccccgcgcagcttgaagccgtaattcggacgtgtttccatgacgatgcggtaaggcagcagacgtttctttacttcctttaaatccgtttggagtgtagattttgagataaatagttcttcagcaagttcatcgagcttgagataatggtccgccagcagcagacgtttcataagataggccattctctcctccggcaataccggcaggccctttttttgctgaaattcatcttgcagcagtgttctgaatacttgctcgtcatcaatgcggagcttgtagccggagcctcttacagattgtacaaaggcaccgtggccgcttagcacaccttgaagttcctttatatcattgcggactgtccgcgtcgttacgtttaattgcgcggcaaaaaacgaacttgtcaccggggcttcagccgccatcagcaagcgcagaatatcacgtagtcgcccatgaagcatgagaaaaacctcctaactagtagatgcagggattcagtgaataggcagaaaggatgatgaagggatgcgaaatgtatataaattctataatggagagaatggcaagtcaatgaacatccggaggactagagggaaaactgacctataaaaaaacagccgggatcagccggctgttctagatgcggacatattcttttgtttagacgccttgcggtccttcatgatttttcgaacaatcgggtaaatgaccggcgcccatttgataacggttttgatcatctttttcaaagctccgattctcccttcttttttctcaaccattcccctgattgcctcttccttaaacatgctaacgcgacacgtacctgtttcccgtcacccagaaacgccatggataatcgcgtgcctccccgctgttgtcaatgccgatgcgcgggccggttgaaattgcttccggtgtgtacccgctttcgatgtaaagcggctgttccgtgatccagcgtccgtagtcattcatcgtgacgccaagcgctttcgtcagctttcctggtccgtttgtccattccctcggactcctgcccggccttctctcctccattaacagctggccttcatgcggctcaatcgccctgattaatactgcttgcgggacatcctcttccgccgcaacgacattcagcaatgtatgggtgtgcatcacgtatgtatatacccgcccagcttctgcaaacatgatctcagtccgcttcgtccggcggttgttaaagctgtgggccgctctgtctccagcccccatataggcctctgtttccacaatatagcctgacgctgtgccttcgtctgtttcttttacaagaaggcagcccagaagcgatggggcaagctcaagagcggttttttgataaaacgtgatgggcagcggatttttttctctcgtcacgaatcgacctctccttttaccgatttttgtacattgtaccattcccgaagcagatcaaaaaaaacggctgttttaaaatctttccattcagggaatattgttaccgttcaaaaaaggagggccaaccattgaaagatgatcatcaaaacaagcagcaccaatcaaatgcccaagggagcgaggaagcgttttctcataagacatccgggaaaaacgagtcagaggataccttaacgaataggcaggggcatcctgttactgacaaccagaatgtgagaaccgtcgggaatagagggcctacaacacttgagaactatgattttctcgaaaagatcagccacttcgaccgggaacgcatcccagagcgggttgttcatgccaggggagcaggtgcacatggatattttgaagcgtacggaagcttcggagacgaaccgatttcaacatacacaagggccaagctctttcaggaaaaaggcaagaaaacaccggcatttgtccgtttttcaactgtgaatcatggaaaacactcgcctgaaacattgagagacccgcgcggttttgctgtaaagctatatacagaagacggaaactgggatttggtcggaaacaacctgaaaatcttttttatccgcgacccgctgaaatttccggatcttgtacacgcatttcagcctgatccagtgacaaacatccaggatggtgaacgtatcttcgatttcatttctcaatctcctgaagcgacacacatgatcaccttcttgttttcgccttggggcattccggccaactaccggcaaatgcagggttcaggcgtacatgcctataaatgggtgaatgaggagggcaaggccgttctcgtgaaataccattttgaaccgaagcagggcatccgcaacctgacacagaaggaagcagaagagattcaagggaaaaactttaaccatgccacacaggatttatatgacgcgattgaaaatggcgattatccagagtgggaagtgtatgcacaaatcatgagcgatgatgagcatcctgaactggactttgatcctcttgatccgacaaaactgtggtataaagacgattttccatggaaaccgatcggcaaattggttctgaacaaaaatccggaaaactaccatgcggaagtggagcaagcttcatttggaacgggggtgcttgtcgacgggcttgatttttcagacgacaaattgctccaggggcgtacgtttgcctactctgatacgcagcgctaccgtgtaggcgcaaattacctgcagcttccgatcaactcgccgaaaaagtatgtcgccaccaaccaggaaggcgggcaaatgcaatatcgggtcgatagagcagaaggacaaaacccgcacgtcaactatgagccatccattatgggcgggctgaaggaagcgaagcaggacggaaaagaccatacgccgcatgtcgaaggcgatgtaaagcgtgaagcgattgacagaacaaacaacttcggacaggctggagaaacgtaccggagatttactgaatttgagcggaacgaattgattacgaatttggtgaatacgctttctacgtgccgaaaagaaattcaggatcaaatgattgagaatttcacaaaagctgatcctgactacggaaaacgcgtagcagaagggctaaaaaaggtttccgaaaacaacagcaacgggccgatcggcacaactgaaacggaacaggctgcaaagcaggctgaacaggagagccatccatctaatccgtattaacaacagcgaacagggctttttttgaagccctgtttttttatttttctattgaaacgttttcaacaattgtgttgtactggaaggaaaggggtggagagatacgatggaattacagcaggacttgattcctcagaaaaaaacaatcggcgccttagatcacgccgtttttttatgcatggtattttgtttctggttttcaggctatatttacgttcctgtattcagtctgtatttggaggatctgcacttttcatatggcgcaatcggcatcattctcggcagctacggggtcacgcaaatccttctgcgattcccgctcggccttgtgtcagacatcctgttttccttgcgcaagcaattgttaattgccgggttcggcttttccgtcctcagcagcctgctttttctgatgtttgattctttcttcttcgtgctggccgcccggcttttcgcgggaatcactgcttctatgtgggtgatggcgaccattttatacgcacattatttcaacaatggcaatgcatcaaaagcaatgggcatcatgcagttttttaccgtcatgcctcagtttgccagcattgtgttctgcgggcttgcggcagcccatttaggcaggcaggttcctttttggatggcgctggcagcctcggtcgccggtctggtgatctgctgctttattaaggatccgtctgctcctcccgcaaaccgtgacaccattcgtgtcaatcagtacatcaaagatacattgcagctgccaaagctgaagcttttcaccatcctgtctatgacggcccatgccgtattatttatcacagtattttgttttacgccgctttacatgaatcagctcggaatgggtgacgcggagcttctttgggtgatgagcgcctttttcctcccacacgcagccgccacattaagctttgtgtttctgcgctttacaagccgtatcgcttactccgtgatgctcattagtttcgctgtcaccggggtctgtttgctatatgttcctttttcagctgcattgttcacggtttgcatcacacacgcctgtatcggactggcgctcggcttcgtttttcctctgttgctaagccatgtcgtcgaaatcagttctgcccgattaaaaatgtcagtgatggggttttatcaatcattttatgcgctaggcatcttcctcgggccccttcttgccggaaaaatcgcacagcttgtcgggcttgcgggagttttttatggagccgggtttctggcatttgccgccttttttgtgatgctcgcgcaaaaacgtaacatgatcaattaatagctttcataccgccggaagcgccacacagaaaacacggccagaagcatgatgcacagaatggagaaagtgagtgaccatccgaaaaaatctgcccgctctccatgaagaaggatatgctccgcctgcttgcaaatctcagccggaagccacttcgcaccatctggaaatagtgaaacagcaaaggaaacggctgctgtgagcccgatcccgcaagccgcagctgctccgacagaccggaatatcgtacttccggcaaggccggcggtcacaataaatatcacccaaagcgcgtaaaggccaaggcttgcggcaaagcggctgaatgatgcgtcctcaaacagcagccggacgtaataataagcaagcccgtatccagctgcaaacgacataatgccgatcacgctttggatgagccatttactcacgatataatgggctgccgtcacaggccgcgacataatcagcgctgttaccccttgatttctttcattggctacactgcccatcacgctaaagatgaccagagccatgccaagcgtgttgaattgagaaagcgtgcttaccatcacttcagacccggagggcatcgtaaaactgattttcatgccgtcaggaaggttccctccatgtgcgatgatttccggcatataataaatggtcagcggctgtgtcagcccgacgatcatcatcgcaatcggcagccaaatcagcttgccgcttttccatccttccagccactccttctgcaaaagcgccatcatcaccttcatgcgtgcaccacctttagatagacgtcttctagagactccgttttctgttcaaatcgggtgacggtcaatccctttcggatacagtcacttaataatgaccggccagcttgtatatcaggcagctcgaaaacagcttgggacggatttttatagacaatagctgagacgtaaggcttctcttcaagccagccttccagcttctctttcactgaaagggtaaaaacgttcgtttgctgctgttgtttcagctcctgtaactcgcctttccatgaaatttcaccatttttcataatcaccacttgatcacacacctgctctgcatcgtgcaaaacatgtgtagaaaacagaacggccatatgctttttcagctcccgcatcatgtccagcacctcgaaccgtcctgtcggatcaagcgcagacaccggttcatccaatatcaaaaacttcggtttatggagcagtgcctgtgccagaccgagtctttgtttcatgcctcctgaatagcccccgatctttttgtgcgccgcttcgtgcaaacccacaaattccagcatctcgccgatttcctcttggcattttctcttcgaaaggccggacagtctccccgcaaatgtcaaaaattcatttgcggtcatccaggaataaaaagctggatactgcgggaggtacccaatcaaacgccgatccggctttttttctcctaacagcttaatgtttccggaggttggcgaaagcagaccggccagcatttgcagagtcgtggttttgccggctccattaggtcctaatagtgcgacacactcattttcattcacgtgaaaactgacattctttacagcttcatgatgcctgtacgatttgcataatgattcaatagacagcatatcggcttacctttgctttctgccgacggtaaaaaacaaaatcggcccaataatattgatacatacaatgattgcagcccacatccactttggcccgtttgtccgctcttcttttatacagctgataagggcaaacaccgccaaagccagctgtaatacaatcagcggcaaaatcatttcccaagaaatattcattgcttgatcccccttttcttccgatccggcctaatgacaaaaaagtaataacaaatcagaggcatcggtgcttgaatcaatccgacaatcccccaaacccatgccatgcgattacgttttttcgcatcaataaataaaaagattccctgcgccaatacgatgagacaagccgcaaccgttatgataatttctgtttgtgtcatccgcgtttcacctcgcattcgccgagatgcctttttttctcagccgcaatcaaaatcggcagcaccgcaagcacacaaacctgaagcacaataaacacagcaggagcttgagtgaaagctaagattgcagcactcacaaccatcagcgcgcagaatacaaataaaatgatctcttgaagaagtttttttctgtattcagctttcatttgtgacagctggtgaagcagttctttttgattcggtatagagggattggctgtttgatcaatttttttccattctgactttaaatgatcagaaagcttttctttattcatcgtcccactcctttctgatttgctggagccctttatgaactctggactttacagtgccttctttgatttgaagcatcaccccgatttcagcgtaggtatagccgtagtaatgccttaataaaaccggtgtgcgcagtttagggtccagctttgaaaacagatcgagcgtttcgctccactctgcccctttcgccgacacgtcccacttgatcttgcggattgtttcctccgtaactgtctgattccgtttccattctctctttctctttttctgatgatcgagatagagccgcgatgcaatggagatcagccatgtggagaattttgaacggccctgaaagcttcttaaatggatgtaccctttcagaaaggtttcctgaacaagttcctcgctgagatcggggtgaagggaaagctttaacaagtatttatataagaaagaatagtgatagtggaaaagggctgtaaacgcctcgtcgtttccctctttcgcctgctggatcagccgctgttcttcatgtgtatccaatgaccgtgatccccccttttttgtttttctgccttatgagacgacaccggattcaaaagcgttcatcttttttacaattcttttcagccattgacagatcaggcttcccggccgtttggctgcatatccttatttgtaaacccccttatagtctgttaagctatgactttatgtcgatttcaaaaaaacatccaatatggaggacgatgcattgaaagtagaaaggcgaacgattgaatatattccgaatgaagaaagacatggtaaagcgaaagatttatttcccgtatggttcggggctaatatgcatatcaccacgttagtgaccggcacgattcccgttgcaatgggacttaatctgttttggagtgttgccgctattatttgcggaaccttaatcggtgccatatttatggcgtctcattccgcgcaaggccctcagctaggcatcccgcaaatgattcaaagccgtgcccaattcggcgtaatcggagcgattcttcccctcttcttagtcatgtttatctaccttggtttcttcgcaagcagcacgattctggcggccggaaccttaagcagctttgttcccatcccgggatcatggagcattataggcttaagcgccttatgttttttactcaccattttcggccatgatttgattcacaaaatgcaaaaaatcctttcttggacctcttttgctgtattttttgctgcaacgattctcatttttcaattgccgattccggcaggcagctggattcccggagcgattgatctgccaattttcttggtggcagtcagcgcagttgcgacgtggcagcttgcctacgcgccatatgttgccgattattcaagatatctgccagttaaaacaccggcttcaaaaacattttggtacagctatgcaggtacatctgtcagctccatctggatgatgctgctcggcgcattgctgacaacctcacttcctgactttacggcaaactcaggcagccagattgtccaattgttcggtcccttctcgtttattatgctgatcattgtgttatttgggcaaatggcgatcaatgtttttaacctgtatggggctttcatgtccacgacaacaacgctggagccatttctgaaattaaaagtcacgcccaaagtcagaatcatcatgatcctgggtgtcacgcttgtcggcacagtcttaagcctactgggacagagcaattttatggagctgtttttgaattttatctttttcatcagttatttcttaattccgtggacggcaatcaatttagtcgattactacttcgtccgccacggaaagtatcaagtcaaagccatgttcgacgtaaacgggccttatggaaaggtcaattggatcaccacaattgcgttcgtgctgtctatcttgctggaaattccgtttatcaatacaagcttttacatcggaccgcttgccaaaatgtttggcggcggagacatcgcatggattatcggcttggccgtgccttctgtgctttactatgcattaatgaaaccgcgtctgaaaaaacgggcggggtatcaagaaaagctgtcttctctctgaagacagcttttttatcattcaaatcgtttccacacgcggggcaggatgtcagatagctcatgagcgagcaacgtatgagcggagtgctcgtccgtccagagctcggcgcacgcaccatgcaaatagaccgcgtttaatatggcgtgctttggatcttcatggcagcagagcatccccaatatcatgcccgtcagcgtgtcaccggttccgcccttggcgagcgccccgtttccagttggattgagccagcagtctccatcaggaaacgcgatgacggtttggtttccttttaacacaatgacagtctgcagctgagccgcccattcctttgcatattccgctctttttttctgcaattcgttcacgggcacccctgtcattcgggaaaactcgcccgggtgcggcgtgaggatgacgggggcctcccgtttcggatatgtgcgcttcgccagcgctccggcatccaaaataacaggacaatcagccgtaagcacatgatcgactgcctgctgtacgctttccgtttgcggaaggcccggtccgatggcaatggcccggtacgtctcttcaagctgagcatccgccgcctttttccagccgtcacgccaataggtcgcctcgggcaaaacaggaacaattagcgggattacgctttctgatgtaccgatgacaagcttgccgagaccgctccgcatggccccaagccctgcaagcagcgctgctcccggcatgtcgtcacttccagccagcagcaaagccgtaccgtacgtgcctttatggctctccgcatctctttcaggaagcgtggcccttacatgctcttccgtccaaaatggaacattcatctctatccctcctctgctttcttttcctatttttcctgtcccttttctttttcaaacaaaaaagacagccttttagggctgtcttttattttacaggaacatcaaggtgatacaggcggcgatatcgttcgtttgccgccagcagctcctcatgggttccttccatttctgttttgccgttttcgagaaatacgattttatcggctgcttccactcccgcgagatggtgtgtaatccataaaatcgtttttcctttcagcacctcaaacaccgtttccatcaattcacgttcggtaataggatcgaggccgactgttggctcatcgaggatgatgatcggtgtatcctgcagcaaaatcctcgcaagtgcgatccgctggcgctctccaccggaaaaacggatgccggtttcttgtacagaggtatgatatccatcaggcaatgactcaatgtagtcatgcagcttgacctgctttgcggcgcggcgcacatcctcgtcgcttgcttctccgtttccgagcctgatgttgttcaaaatacttgtatcaaacaggtgcggtttttgatttaacacggccaccgcatccgcaatctgatcctttaacagcgctgtctccactccgtttaacgtcacagaaccggagtccggtttcaaggcgccttcgattaatgcaagcgatgttgatttcccagagccgcttcggccgagcagcgccattttttctccttggcgcagcgtaaaggaaaagttgtgcagcacttggctgctgttgtcataagaaaacgtcacatcacgaaaggccaaggtgacatcttgaagatcgagcatttgatcccctgattcagtttgtgacgcctccagctgaggagccaccttgttcatgcgtctgatagaatcctgatagcccggcacttcgcctaaggcatccgaaagcggcaaaaaggcttccgtcaacggaaataccactagcacaaaagcggcaatcatcgttttagcgagctcgccgtccgcttgctgtcccgctgtccaaaacagcatcatcaaaataaggccggcgacaaggcattgcgcaacaaagtcccgccatcttgtaaagcattgttttttccgttcaagctcaaaccaatcatgttcctctttttcataagcatcaataaaagcatgccggcgtccgctgaacatccagtcgctgacacccatcacagcatctgtcagacggctgtacagcgcattccgtccgcttttcagcttcgcattcttcgctctcgtcacgagcaaagacacaaccggaaacaatacaacaagaacaaacaaatacagcgcaagcaatatggcaaacggccaagagaagaagccgagcgctatcactgacacagcatacaggagcaaggctgagatcgcaggaaaaatcgtttttaagaatgcatcctgcaaatgctcaatatcctcagacaaaatgccgagcatatcccccgtgcgaaaacgggaacgcagcatcaaagcacccggctcaagcatattgtaaaggcggacgcgcatgtcggatacgattttcaaaatgatgtgatgcccgacaagccgttccacatatcgcgacacagaccgcgcaatcccaaaagtgcgcactgcgacaatcggcacataaatgagcagaatgttttccggccttgtcgccgctttagaaatcaaaaacccagaggtgaacatgagaaaagcagcagaaaaaatcgtcaccgcgcccaaaaagataaccagaacaaacaggcgggcattttgcttgatatacggcaaaatccattcttctttcttcatgctctttcccccagttgtgccttcacgagtttggtatacacaccgtttttctccagcagttcattgtgagtcccgatttccgcaatcctgcccccgtccagcacgataatttcgtccatatcgagcatccagtgaaggcggtgagtcgcgagaaagacgagcttatcctcaaataaatccagcatcgtttcttttatttcatattctgtttcgatatcaagatgggcggtcggctcatccagcagcaggatcggacggtttcccaaaaaggcgcgggccagcgcgacacgctgtgcctggccgccgctgagcgcccggccgccttccccgatccgcccctctaatccttgaggaaggctatccaccagctccgccagtccagctgccgcagcagcacgggctgtatcctctgccgaagcgcttggatggtagaagcgaatgttgttgccaagcgtatcatcaaaaatgtacggatgctgtggaatgtaaagaaggttcttctgccagctgccgtcctgcaaatgggaccggcttgtaccattaacctcaatcatcccgccatccggctctaaaaatccgccaagaatatcaattaatgttgattttccggcgccgcttgcaccgataataccgatttttttcttgcccttgaatgagagatgaatatcagacaccgaacggccgactgacacgcctgacagcttcagctcatcctgatcagaccaagcctcgagctgaagcggcgtctcttctttaaaaccaggctgcgacaaaatctcttgaatggtttttcctgcttcctggccgttcagcgttgcatgataatcattccccacttcccgcaccggcaaaaaatactcaggcgccagaataagcgccgttaaagcagggccaagcaaaatatcgccgtcaatgaggcgcaggcccagaaatactgcgactgtcgccaccgacagcatcgtgaaaaaatcgagggcgaatgatgacaaaaacgccacccggagtgtgctcatcgttgccttgcgataccgctcactcacatagaaaatatttttgctgtgtgacttgctcaaacctaggaaacgcaatgtctccagcccgcgaagagaatcaacaaaatgattggaaagtctctgataggatttccactgacgatccgcttttctctgcgcgacaaggccgaggagaatcataaagatgatcagaatcggcatagcagcgactaaaatgatggctgatgtccgatcctgaaaaaacacataaatgacaactgccgcaggcacaatcgccatgctgaccattttcggcagaaacagctccaggtagcggcggaactggctgatgcctcccatcgccagcgtcaccatttgccccgtcccctctttctttgcaaagcgggggcctaatcggaacagctgatcaagaaaacttttcctcaaatctgctcctgtccgggcggcgtattgatagacgattttctgtcgcgccaccgtcaccccgtgccgggcgataaaagcgatgaggaaaaagccgatcatcggaaaaagggaggtaatgcccttcccgttgaacagtccggttacggcctcactcagccactctgcctgcataataatggcggctgtctgaatcatcgttaaacaagtaatcaaggtgagaatccgcttcattcctttatatcgaaacaggtcttttcccattaataagtcataggctccttatggctgacgcgcttccggaagacataatagctccagatctggctgccgatgacgaacggcaatagcgttaatgctgcaattgacatgactttaagcgaataatctccggaagaagcgttagctactgttaaatcgtatgcgctatgaagcgagctgaccattacgcgagggaatagggaaataaagatcattcccacggtcagcgccagaccagcgcctgtcatcccaaatgtccagccgtcttttttcttacgaataaatacagccgcgagcataaagcagatgacaatcaaaacagcgagcggaatggtaatctcgccgcggcgtgtaaacatgtctgtctgatacgcagaaagggccgcgaaggcaagaaccgctacaaaaacaacacccattatcttttgcgccattttccgggcgcggttttgcaaatcaccaatcgtacgcagcgtgataaacattaatccatgctggaagcaaagaagcgttaccgtcacaccgccaagtatagaatatacattgatataatcagaaacatgtgcgtgaatgttcatgtcggcatcaatcggcatcccgcggaataatgtcgtgaacagcacaccaagcacaaacggaggaatcagactgccgaagaaaacgacccagtcccaaacctttacccattttaaatgatccaccttgccgcggaactcaaacgcgaccccgcggcccattaacgcaagcagcactatgacaaacggaatgtaataaccgctcagcatcgttgcataccagtttgggaatgccgcgaaaatggcgcctgcgccagtcaaaagccacacttcattcgcgtcccagaacggcccgatcgtgttgatcagcactctgcgttctaattcattatggccaagaaaacgggtcgccatgccgaccccgaaatcaaagccttccaaaaagaagaaacctacaaacaatacggcaacgagtataaaccaaagatcatgaagagatgccatggtatacctcctgactaaatggatctgttgatacaggaacatcatgatgatcactatgctccgcaccttttttaatctcacggataaacaagaagacaagcagtgcaccaagaatcaagtacatcacaccgaatgcgatgattgagaataacagggagcccgctgttacattaggcgacacggattgagcggttgtcattaaccccataaccgtccaaggctgacgtccgatttctgtcataatccagcccgcggagttcgcaagaaacgggaaggaaatcaacgcgatcatgatgcgcaaataccatttgctgttttcaagctttttgcggcggtttaaccaaaggccgcctaacgcagcaagaatcataacaacacctgctcctaccatgatgcggaagctccagaatgtcgttttcactggcggaatgtagtcgccttttccgtatattttttcgtactcagcctgaagggttttcatccctttgacacttccgctgaatttctgataagccaagtagctcaaggcataaggaactttgatttcatttgagcttttttcattttttgtatcgatcgtcgcaaaagcggtccaagcagcagggtcaccgctgtcttcccatagaccttcactggcagccattttcatcggctgtgattccatcaagtgctcagcctgcatgtgtccgctaaggccgacgccaagaccggcacaaagaccgacgatcattgcgagtttaaaagattgcttaaagaacggcacttcttttttcttcagcagtttaaaagcactcactccggcaataaagaaagctccagtggcaagcgcaccgaaaataacgtgcgggaattcaacccaaagctgagggtttgtaatcaacgcgccaaaatcattcatttccgcgcggccgtttttgatcgtaaaaccgaccggctcctgcataaaggagtttgctgttaaaatccagaaagatgacatgatcgttccgaatgatacgagccatatgcagagagcgtgaattttcttcggcaggcggtcccagccaaaaatccataatccgataaaaatagattccatgaaaaacgccaataatgcttcaatcgcaagcggagcgccaaatacatctccgacaaaacgggagtaatctgaccagttcagtccaaactggaattcttgcaaaatccccgttacaacaccgactgcgaaatttattaagaataagtgtccccaaaactttgccattttgagatacagttcatttttctttacaagataaagagtctccatcaacgcaaccataaacacaagcccgatagacatcggcacaaacaagaagtgaaacaacgttgttgatgcaaattgtatgcgggctaataccaattcactcatgctttctcctccatttccggttaaaactgttaatttgctcactacttcacaaatagaaccgagactttgatcagtaattcacaaaatagacgaaaaaaatattgttcaatatttcacaaatgtgtcaaaaagtcgtccaatatgagacaagattgccagactgaccaaatgacacaatctctgactggttcatattaagtactttacaacgattcatttcaaaaataaagcctaaaatacctaaaaagtcccgccctatgtgacggatttttgtctattttgttgcttatttatgtcggctgctaggataaatgaccctttattatcgtacatcaacacatcgttccttgcgaacaaaatgcttgccctgcaccagcactcgtttctcagcactccgtcataaacagattttaggcaggatgcctcttttcatttgaaccggcaagtggagaaaagttgaatagtaaatttttaatatattaataatttcaattttttagtatacttaacatagtgaacaatttcactgcatcaagaataggggaggtttttcaatgggagagcttcaaacacacatgcaattgcaaacggatacaattcacgaaggggttcgaaaagagaattggtttgcgaaagccatgaatataaaagtaggcatcataccgcttcctgtgtatgccttgctgtttatattaatcactgtttttgttatgcatcacgatgtaaaaagtgacattttgacatccattgccgtcatggcgtttttcgggtttacctttgcccaaatcggcaaatcgataccgattgttcgttctatcggcggcccggccatcctagctacttttattccgtccgctgtcgtgtactatcacctgctgcctaatgatatcgtcaaatccaccacagaatttacagaaaactcaaactttctatatttgtttatcgccggtattgtcgtcggaagcattctcggcatgaaaagagaaacactcgtaaaagcattcatgaaaatctttattccgcttattgtcggatctgtcacagccgctattgtcggactggctgtcgggacattgctcggactcggatttcagcataccctgctgtacattgtcattccgattatggctggaggagtcggagaaggcgctatcccgctgtccatcggatattctgacatcatgcccatttctcaaggggaagcgtttgcacttgttctgccatcgattatgctgggcagcttgtgcgcgattattctagcgggattgctgaaccgcatcggaaagaaaaaaccggaatggacaggcaacggcaaagtggaccgctccgaagaagagtcccctgcgctggaggaatctcaaagcggacaacaaatgttcaacctttctttatttgcgtcaggcggtatccttgctgtttctttatacttagtcggcatgctcgctcacgattttttcggttttccggcacccgttgccatgctgttactggctgttctaatcaagctgttcagattggtgcctgcctcaattgaaaatggcgcgtttggagtgtcccgctttttttcaacagctgtgacctacccgcttctctttgcgattggggtatccatgacgccgtgggacaagcttgtcgccgcttttaacctcagtaatattattacgattctgtctgtcgttgtgaccatgatggccgttggcttcttcactggaaaatggctgaacatgtatccgattgaaaccgccattatcaatgcgtgccattctggacaaggcggcacgggtgacgttgccattttaagcgccgctgaaaggcttgagttgatgccgttcgcccaggtatctacccgcatcgggggagcgatcacagtatccttaaccttattgctgctgcaccagttttattgatccccgcaagcaagttcttcgtcaaacgaaagagcttgcttttttgcatgtccatatttttgcaagttcccatcccatgctatagtaatagttggaaatactagatagaaaggaatctggcatgcctatgggaactcatctatttctctttatgcttctcgggctgggattttatttgatatcagccctagctgcaaaactcattccggccatagacttctggattgatattgttctatgggtcggcgctgcagtttacatcttctctcatctctcattcatggacggcattgtctcactcgcgacaatgttctactgctattggaccgcaatggatctcattgtttcagagcgtgtggaaaaaccttcgggagactggcaggaaatcgagctggccagaaacaaaacacgtctcctgtcagacattacgctgaccgccattgtgtttgcaggggctgttatttttttcatctatggacctgacccaagccctctcaaatatgtgatccttctcggcatgatctccggcggaggggcactggtgaagcgtatactgaatgttttcagcgtaaaggttttttattcagcagccttagaaaaattgcatatcagctcacactatgaaacccgtacatacccgctttccgatttgaaggacattcagcttgaatcaacagctgatctcttaaagctccatccgcttctgacgatgtattcatcacgtttagatttgacaacaagctttcagcaagtcattaaactgtctcttcccggcgaaacactgtttctgacggtgaaggaaccgcaaaaatggaaaacaattcttcaggaatacacagatgcaaaaaacaatgtggacaatgtgatttctgttttgccgttttatcatagaaaaaatgtgaagcggctgctcgggaagctttattttgccgccagcgtaaaaggggtatccgcttacgccttattggtgctcgcgttatacgcatcacacgcctctccatgggtcatggctgttgccgtaatcctatattgggtattcaacatgtatatgtcagaccgtgtgttgcgggcagcgatggacgccaagccttgtcatcatccgcatgtacaggcagcggccgatatgattttccgatcggccggcatttcccatgtccgcatatacgaaacggagagtgatgattacaacggaatggcagtaggcatgaatgtcgggaggtcaatggtcatcctgacaagcgccacactaacacttccacagcgtgtcatcgaaggcattctggcccatgaggcaattcatatcaaaaaacgtgacgttctgtcatcacagcttttgcgttttctatatcttggagctgtcgttgggattttcctcttgtttgagcagcatatcacccatcccgaggcccacaaaattgcgctttgggctttcattatggcaatcattatcctattccagctctatcaatccttttgttcacaatggatggaggtgcgtgctgacaaccttggcgcatccttgctggagggcggttacaaacaaatggctgaagccttgaaaatcttggcggttcagcaggatgaggacatacagaaacaaagtgcctacagctctgaagccggtgaagacgagcttcaaattgactctctcacccgtgataaaagctggtttttcagattgattgattttcagttcgctcctcatccccctatgtattggcgtgtcggcactttattgtcaaacaaaggacatggggtgctaaagcgctggctcagagaccgcctgaaagaatcgatcactttgaaatgaaaccggtcagcgtttcatccgtataacagatatggtgaaaaaagggagtgaccagaagtgatagtgatcttattgataatagctattattgtttttctttcagtcattcagccgcagccatcggataataaaatccgccagcaggcggacagcgggtatttcggttattcagatcatagctcgcaccatgatggattcggcagtgacggaggtttcagcgattccggctgtggcggcggagggggcggcgattaaacgccgcctttttttatttcattgattcgatgtacgcaccaaaagccgagcccgacatgcctggggacacgcgcacacgatggagggcatacattccctggtctctcgaagccgcgcccggttctgtcgtcacgcccatttgatagcctgttttttcagcggccttcagcgtctcctcattgtagcgccctaccggatagctgatgatggtggtttgctgatgaaacatgtggtcaaacagctttttcgaatccgccatctcactttgctgctgttgaggcgttaatccgttcagctcaaggtggtcaatcgtatggctttcaatcgatatgccgtgctgtgccatttccttcatttgttcctctgtcagatgatgcttatgtccgatcgatttgccgatcataaaaatcgttgccttcatcccgtactttttcagcaccggatacgcatcttgataattgtcggtgtacccgtcatcaaatgtgatcagcacgcacttctcactcggttttttatcctgcgtcagcatgagatatgcctctttcggcgttaatgtctgatagccgttatcatgaagccacttcatatgcgcctcgaattctttctttggcacacggaggctgtttcctgaagaaatgctgtggtacatcaaaatcggcagctttgccggtttctctgttttgatccatgcggatgtatcgtcttcttttttctgaacttgtactgcctttttttccggtttcttttgttccgcttttggcatcggctgctctgcattcgcctcttgatcagcgcaagccgcaagagccaaacagctgcccaaaagaaagatgcttaaaaacaatcgtttcatcgttctcctgctttctgtctatttcttcctcctttttcatcggtttgattctgagattttcaatagcaaaaaaccggacatgtctccatgtccggtttttttgatcctattgaattctcacttctgtctcactgtcaaagaaatggcctttattcatatcaaatgcaaccgtcagctcatcgcccgattgaatatcgaggcgggcgtcgatccgcgcaataaagtcttggttgtctatctgcgaataaatcataatttcagaaccgagcagctctgcaacattgattttcgccttaatcgaagagttcttatatgattccacgacaatcaattcatcatgtatatcctcaggacggatgccgaagatgacctctttgccgatgtagcctttttcacgcagcactttcatttttccttccgggacggttaatgccgcagaaccgattttgattaagccatccgtgagctttcctttgaaaaaattcatcgccggtgatccgataaacccgccgacaaagacgttttcagggaattcatatacatccttcggcgtcccgatctgctgaattttcccatctttcatgactacaatccgtgtcgccattgtcagcgcttctgtctggtcatgcgtcacataaatcgttgtagtctgcaatctctggtggagcttaatgatttccgcccgcatttgcaccctcagcttcgcgtccaggtttgacaaaggctcatccatcaggaacacctttgcatcccgcacgattgcccggcccagcgcaacccgctgtctctgtccgcctgacagcgctttcggtttacggtgcaaatattcctccagcccgagaattttagcagcttcctctactctttttttgatttcaggcttcggcattttccgaagcttgagcccgaacgcgatattatcgtagaccgtcatatgcggatagagcgcgtagttctgaaataccatcgcgatatccctgtcctttggcgctacatcattgacccgttttccttcaatataaaaatcgcctttcgaaatttcttcaagtcctgcgaccattcgcagcgtcgttgatttcccgcagccggacgggccgacgaatacgataaattccttatcggcaatatgaaggttaaagtcatcaaccgccggttccttctgatcataaaatttataaatgtgctccatccgcaattcagccatctaacatccccctttgttattgtaaacgctttcttatattgagtgtaacagcaattccctctcgctaaaatgggcagcgttcataaaatcatccagccatttttcgtgcatatttccaatttattctgaactttcattttgcaggcagataaaataggcaagaagcgcgcctttgtacgatttgatatctatccctgaccgctcaataaatttatcaatccgatattgcaggctgttgcgatgcagatgcagctttttcgctgttaatgtgacgtttgagttgttttcaataaacagcttaatggtcttccttagctcagcttcacttccaaataaaagctcagcttcttcagagagcagcgtttccagtttttctttttctgtttctaataatagaaaaggaaagatcatctcaaaggtcacactctgcacctgaggcagccgtttttcagcaaacaggaaatacgcctgttcacgagtgtaatgttttcgcagacactcatccggctcgtaaaatcttccggcgtaaaaacggacactgaagtagaaatcactttcaagaacttttgcgagcgattccagttcgcccttcttcgccgccgcttcactttcctgctcgacaatcacgcctctgtcctcatgaatccacacaatcacaaaagacaccggccaaaaatggcgaaccgcttctgtaaaggacgtcctttctattttgccgaataaatgaaagtgaacaaatctcgtccgtttctttatgtacgccggcaattcccctctggaaaaaaggaacgaaaaccacttgttttcctcaggtgatttcatagacagttgattgccctcatccgcaggcgtcaaaaatgattgcagcaccaatacttctttttcactgatctctgttttcggaatggagatatacctctgattgctctcatcaaaaaaacatagacagccttcccttatgcaaagctcctcagacacaatcgaaccgggataaatagccagcagcgatttcatagagtctcctctcttatgtaaggatctgtatattcagtataaggcgaaacacacatgttctccactaaaaaagagtatatccggtatagatagacgagaaactgaaagggaaacctcattcgtttacatattggcttcagcggaaatagaagaggatatgcaggaccaaaggagggccatcttatgagtttcgaaacgttaaacaaaagttttatcaatggaaaatggactgagggagaaagcggacgtacggaggacattttgaatccgtatgaccagtctgtgatcacaacagcatctttggcaacgggcaaacagctggaggatgcgtttggcattgcacagaaagcccaaaaagagtgggccaagagcacgacggaagaccgaaaagccgtcctgcaaaaagcgcgcggctatttacaggaaaaccgtgaagacatcattatgatgatcgcccgcgaaactggcggaacgatcattaaatcaacaatcgagctggaacaaacgattgcgattttagatgaagccatgacgtatactggtgaattaggcggcgtcaaagaggtgccatccgacattgaagggaaaaccaataagatttaccgccttccgctaggtgtcatttcatcgatttctccatttaatttcccaatgaatctatccatgagatccattgcgcccgcaattgcgctgggtaacagtgttgttcacaagcctgatatccaaactgctatttccggcgggaccatcattgcgaaagcgtttgaacacgccggtcttcctgccggtgtccttaacgtcatgctgacggatgtaagggaaatcggggacggcatgctcaccaatccaatcccgagattaatcagctttacagggtcaacagcagtcgggcgccacatcggtgaaatcgccgggcgtgccttcaaacgaatggcacttgagctcggcggcaacaatccatttgccgttctttcagatgcggatgtcgatcgtgctgtggatgccgcgattttcggaaaatttattcaccagggacaaatctgtatgattatcaacaggatcatcgttcatcaagatgtatacgatgagtttgtagaaaaattcaccgcccgtgtcaaacagcttccgtacggcgatcaaaccgatccgaaaaccgttgtcggcccgctgattaacgagcgccaaatcgagaaagcgctggagatcattgagcaggcaaagacagacggcattgagcttgcggttgaaggaaaacgcgtcggaaacgtgctgacgccgtacgtctttgtcggtgcggacaacaacagcaaaattgcccaaacggagctgtttgccccaatcgcaaccattattaaagctggcagcgaccaggaagcgattgacatggcaaatgatactgaatacggcctcagctctgcggttttcacttctgatttagaaaaaggcgaaaagttcgccctgcaaattgacagcggcatgacccatgtcaacgaccagtccgtcaatgattcgccgaatattgcctttggcggaaacaaagcaagcggtgtcggccgtttcggcaatccgtgggtcgtcgaggaatttaccgtgacgaaatggatttcgatacagaagcaataccgcaaatatccgttctaaatgaaaaaatccctctgtttcaagtacagagggatttttctttatttagatatatccacaaacccttcgccaaacacatcgcgtacgtcatgaacgatcacaaacgcttttttgtcgcagcttctaatgatttttttcagcatagacagctcctgtttgttaatgacgatatacaaaatctcttttgattggcccgtataatttcccttccctgataaaatcgtcacgccccgatccatcaaggtattcacctgctctgcaatctcactcttattttctgaaatgaccgtaatggcttttttcgtattcaaaccttcaataatgaagtccatcactttggtaccgatatacagcatcacgatcgtaaacatcattttttctgcaccaataataaaataagagctaaatactacgattaaatcaaaaaacaagagtgcatagctgatattccagtctaaatatttattagcaattctggccagaatcgcggaaccagccgtcgtcccgccgacccggataatcatgccgatcccgactccggcaaatacacctgcgaaaatcgtattaatgatcaattcatcagacggaatgctccacccatgtgtcagatgaagaaaaagcgaatttgccgcaaccgcaatgatcgtataaaccgttgtttttccatccagaaacttgtagccgattaaaagcaaaaacgcatttaagataaagttcgtgacaccaggagaccattgaaacagataatacaatatcagcgtaatcccagtgactccgccttccccaagatcattgggaatcgcaaataaattaaccgcaagcgcgaagaaaaaagcgccaatcacaagcataagtacatccagcattctctttttcatcacgaaaacactccttctcattgttctgttctactagcaaataaaaaaacccaggagaacgctctcgaaaaagagcagaaactcctgggcttttatcccaccgtgtcataacagccaatctgctatgtgttttctctcggtcacagtccaatttgcattgcggaaccctagaaaaccactgtttttatcatatccttttcactttccaatattagcattataagggacggttcgaattggttcaaggggtatttgcggagttttcatcagataagctggaagaaaaaacgatttatctattaaaaaagaacagatataaccgataagaaaaaaagcatatattttacaagtaaatgtaactataaatgataataattatgagaaattcataattttatattgactaagtgaaataatataggcattatagtacatatgtttcgtacattttattacataggaggaaatataatggcaggaaaactagtaccctgtaaagcttgcggtcaagaaattgcaaagggtgtaaaaaaatgtcctaactgcggtaaggatcaacgtaacttttttatgcgacataaaatcattacgtttattctcgcagttgttgtcatcattattatcggtaatatgattggcggcggaggcggttcagaagccacttccaaaacatcaagcggaagcaaagcagaaactgaaaaaacatacaatatcggtgatactgtaaaaactgaaaaaactgaagtgacagttacgaaggtagaggacagagatactgtcggtactcaatatgttgaaaagaaagcatctgatggtggtacaattgtagctgttcaatatacaattaaaaacgtatctaaaaagccaataagttctttttcaattccaactgttaaattagttgatgctgatggtacttcttatgattctgatattgatgcttctgtaaactatgcaactgagacaaaagttgataactctaaaattttgagtgatctaaatcctaatattaaagtaacaggtgtaaaagcatttgaagttgacaaggaagcttatgcaaaaggcacttggaaactaaaattcagtaatgatgttattgtgaaaatcaaataacagctaacaagggtgcctgttcaggcacccttgttctttaaaggccttctctattgagaaggcctccattcttattccgcactcttatacccattcacattagaagactgccatctccaggaatcagcacacatttcctcaaggccgcgtttcgcttcccagcccagttcccgcttggctttcgcaggatctgcaaagcatgtggcgatgtctcccgggcgacggtccgcaaaacggtacggaacctctttccctgacactttttcaaaggctttgaccatttcaagcacgctgtagcctgtgcctgttccaaggttgtatgcatcggctcctgtagagttcaatactttttccagcgccttgacgtggccttctgcgagatcaacgacgtgaatataatcgcgtacgcctgtcccgtcttttgtcggatagtcatttccgaatacgcttaattgctcaagcttcccgactgctacctgtgccacatacggcataaggttattagggattccgttcgggtcttcaccgatccgtccgcttggatgcgcgccgaacgggttaaagtaacgaagcagcgcaacgctccactcattgtcggctgtatgcaaatcacgcaatatttgttcaagcatgagcttcgtctgcccataagggtttgtcgcacctaatggaaagtcttccgtaatcggcgatgtttccggaacgccgtacactgtcgcagatgaactgaatacgattttcttgacgccgaatttctccatggcctcgcataaaataaacgttcctgtcagattgttatgataatatttgagcggaatcgccacagattcaccaactgcttttaacccagcaaaatgaatcacagcttcgatttcattttcagcaaaaaccgcatctaccgcttcccggtccaataagtccgcttcgtagaacgttaaatcttttcccgtaatccccttgacacggttcagcgcctcagccgaactgttggacagattatcaagaacaacaatctcgtagccgctgttcaataattcaacacatgtgtggctgccaatgtacccggcaccgccagtaacaagtattgccatgatgtaaccctcctaaaaaatgacctgttttcattatatagtgtttaaaaccggtccacatccatttttaagaagtttaatcgtttattaatagttttttcatatattatcagcattttcatacctttatgcagcgtgaacaagtatagcagctgaaaaatcaatctgccggttgacgtttttctttccctttttcgctatgcttaatgtagaaaggatttgatgacatggcgatgagcccatatatttttattgtattgattcttattattttatcgatgtaccgagagagagctgtcagacccgggaagttgctgatcattccgctgctgctcttatggggcgtatcagcatcgtttcagccggcgtattttcattccgtattacatgtggcgatcagcggcattttattattaatcgggctggcctgcgggtttggcattggaaagatggtaaacgtgcggattcacccggaaaccggaaaggtcacttcacgcggctcacttgggagtgttatcctcattctagtgatactttctttgcgcatggccgcgagaacatggctgcctgagagcaacgagatgtttattgccattattcattctatgttcttcattcccctcggcaccattacagcccgtaacattatgctttataaagcatacagacggctgaccgctggcaaggtatccattcaataactgaaagaaggaccagcatgaacagacaaactccggctcggcactactacaagaagcttgtgccgagccttattctcattttgaattgcatacaatttttatctcacccagccaaagctgatcccattttgttggcatttgtatttgcggtgtacttagcattcatttgggtcattccctatgtggcatccactgctgttagtttgtgcatattcatcggactctggctcctgaccgatttcttttgggctgtttccggccaagagcagggtgccgcctattttttgattgtatttttaatgatatatgccgcctttagactcccttcacggctatccttgatcttcacagcatgtttaattggaggcaacatattactcctatcctcacaagggggaagcttgaataccatcatcagcaacatctcgatcatgctcgggctgtacgtcctcttctcctccatgcgtttcagacgagaagcgagaagggaggctgaacggaatcatgctgaattggcaaaaatgcatgtgcagctggagcatgctcataaagaactccagaaagcgcatgcagagctgcaggaggcttctgttctttcattaaggtacgcggtccttgaggaacgtacaagaattgcccgcgacattcatgacagcatcggtcacgagctgacttctgttattgttcagcttcaatcccttccctatatccttaaaagcagcaaggaggattcagaaaaagtcattcaaaatgtactgagtgtcgccagggaatgtcttcaagaagtacggtctgtcgttcaccaaatgggccgtagtgaatcgatggtggggcttaccgctttgcgggggctcattcatcaagtggaggaacggagcggcttgcacgtttctttagatactgccggactatcagaagagtcttggcctccaaacgtgagcgaaacgatctaccgcatcttgcaggaagcgctgaccaatatcattcgtcacgctgacgcttctcatgcggcggccgtcatttctaacgacaagtcccatctctatatcacaatcaccgacgacggacaattcaccggcagccttacttatggatttggcctgacaggaatgaaagagcgcgcagaaaaagcaggcggttcccttactttcagtgccgtacagccgagcggcctgaaaattgagctgtcattgccgctcatgacaacgaataaggagcaaaaagatgaacaaagataacatacgcgtcgcgcttgccgatgatcagccgcttgtgcgtgaaggcttccgctacgtcatcaacgcacagacggatatgacggtttctggcgaggccggcgacggtcacgatattatagcactcgcaaaacaaacaaaacccgatgtcatcctcatggatgtccagatgccgcgttgctcaggcatcgaagcagcgaaagacattatgtccgcacttccagatacaaagatagtcattttaaccacctttgacacggaagaatacgtatttgaaggcatccgtgcgggagcagtaggctatctgctgaaggatacacttcctgaagagttgatagatgcgattcgcgctgcggccagaggcgaggcgattttccgtacagtcacagctgctaaaattatcagtgagacatttcaggcgaagcaacagccccatccagaagaactggcagagccgttcaccaaaagagagcttgaggttcttcagcaaatggcctacggactgagaaatgaggatattgctgaaaagcttttcgtcagtgaaagcactgtgaaaacccacgtgcaccgcatcctgcaaaaatgcaatgcccaagaccggacacaggcagtcgtttttgccattcgaaacggtattgtgcaatagaaatctctcatcccgccatgctaaaataagacaaaggagatgattggaaatgaaagaagaaatcattgaacggtttactacatatgtaaaagtcgacacacagtccgatgaatccgttgacacttgtccttccacacccggccaattgacattaggaaacatgctcgttgatgaattgaagtccatcggcatgcaggatgcagccattgatgaaaacggctatgtcatggcaactcttccctccaatactgaaaaagacgtgccgacaatcggctttctcgctcacgtcgacaccgctacagactttaccggcaaaaacgtgaatccgcaaatcatcgaaagctatgatggaaaagacatcgttctcaacaaacagctgcaggtcaccctgtcacctgatcaattccctgagctgtctggctataagggccatacactcatcaccacagacggcactacccttctcggcgcagacaataaggccggtatcgctgaaatcatgacagccatggattacctcatcaaacaccctgaaatcaagcacggcccgatcagagtcgcctttacgcctgatgaagaaatcggaagagggccgcacaaatttgatgtgaaacggttcaatgcttcctttgcctacacggttgacggcgggccgctcggcgagcttgaatacgaaagcttcaatgccgctgccgcaaaaattacgattaaaggcaacaacgtacatcccggcacggcaaaagggaaaatgatcaactctgcgaaaatcgcgatgaagctgaacagcctgctgccggcagacgaagcgcctgaatatacggaaggctatgaaggcttctaccacctgctgtcgattcaaggagacgtagaggaaacaaagctccactacattattagagactttgacaaagagaatttccaaaacagaaaagaaacaatgaagcgtgtcgttgaagtacttcaaaacgaatacggacaagacaggattctgctggatatgaacgaccaatactacaacatgagagagaaaattgaacctgtcatcgaaatcgtcaacattgccaagcaagcgatggaaaacctcggcatcgaaccgaagatttctcccatccgcggcggcaccgacggatcgcagctgtcctatatggggcttccgacgccaaacatctttacaggcggggaaaatttccacggcaaatttgaatacatctcagttgacaacatggtcaaagccgtaaatgttatcgttgagattgcaaagcagtttgaagcgcaagcctaatgccaaaaaaccagtccaaaaaaggactggcttttttgtgtgaaagtgaaacattttaaacgcgtcctccgtaaaacaagtattaacaaatgaggaggaaaaacaatgacaaaacatgcaatcgctgcaaagagtctcttgaaaaaatggatcatttccaggccgcttaacatgcaaaagaaatccagcccatttcaaaaaatcagaaaaatgttcaaacgcttcttcaaataaaacattcaaatcccctaaatacaatccgtattcacccgtaccgcccaaatgctccgtaatttgggttttttgtgttcaattccgcaaaatagggtataaaccaaacaagcaagaaaacagcacccaaaaacaggtaattcgaattacgtaaacttaggttaaaagttatataaaggaatttattttatcgtcgatagtaactatagaaccaatcatcaacgagagcaaacagcgtaattcaagactattttcaggtcatcaggtaatactgttttagagggacagtttcttgttatttattgatttagaattttttgaatactttttggcattttatccgtacaatagagagtaccaaaactttttttgggaggtatgtaatatgatcctatttattatcatcgcattatgcggctatcttcttttttctttcagcaaggacaatcgccgcaaaccgcaaaagacaagccctctgccagcagccgcacctcatcacaacaacctaatcgaccttgacgccatccgccaaaaacgccggatgcatctttcctaattctatatttcaaacgaaaaggctgctgaatcacgcagccttttaaaattgttttgatttagagcctgaaaccttttcgccacatatccgtaatttcatacaaggcaaacccaaaggagacttcagcaatgatcgagttatttatgaaacaaaaaatgttctcatttaaagatgcatttcacatttatgaccgggatgaacaagaaacattcaaggtggaggggcgttttttctcgttaggagactcattacaaatgacagactcatctgggaaaacgctcgtttccatagaacaaaaactaatgtctttattgccgcgctatgagatttcaattggcgggaaaacagtttgtgaggtaacgaagaaatgtaacgtttttcaaaccgaaatttgtgatttccgggcttaactgggaaatcgatggtgatttatggagggatgaattccagctgacggacggggaaaatgtccggatgtcagtgagcaaaaagtggctcagttggggtgattcctatcacttgcagattgcaaacgaggaagatgttctgatttgcactgccatcgctatcgtgcttgatatggttttatataacgatgaagatgaaggtattttctaaaaagcattgacaattgatccaaaagtaataatattaagataattgaaatctgaatatgaagttataccttatcaagagaggtggagggactggccctatgatacccggcaaccgctgtttcaaacagaatggtgctaaatccttaagaacattgtgttcttgcagatgaggcggagatttgatcgttcaagctcttccttacacaaaggaagagctttttacatgctcaatatttcagaaaagaggcgaataacatggctcaacaaacgaatgttgcaggacaaaaaacagaaaaacaacgcaaagcacctttccgcgccgatcatgtcggcagcttgcttcgttccgttccggtaaaggaatcccggcaaaaaaaagcggcaggtgagatgacagcggaacagcttcgtgatatcgaaaatcaagagatcacccgcatcgtggaaaaacaaaaagaaatcggtctcgatgtggtaacagacggggaattccggcgttcctggtggcattatgacttcctggaagggcttgacggtgtggaaccgttcattccggctgaggggattcagttccataacacaaaaacgaaagcgcgcagcatcaaagtgacgggaaaactcgattttacgagccacccagcgcttgctgattatcaatttttacatgagattgccggtaacgcgacgccaaaattgaccattcccagcccaaatatgctgttttttggcgaaaaggcggataaagggatttatgacgatcaagaggaatactttcatgatctggcccaagcgtacaaaaaagcaatcaaagccttctatgatgctggctgccgttatctccagctcgatgatacgtcatggtctctcttctttgaggaaaaaggcagagaggttgtccgggcgctcggcggcgatccagaaacattgccagccatatttgccaaaacaattaacgatgccgtcgcagaccggcctgacgatttaacgatcacaatgcacatttgccgcggcaacttccgctcaacctgggcggcatcaggagggtacgacgctgtagcggaaacgattttggacggcttaaaccttgacggccttttcttggaatacgatgatgaccgctccggaaactttgatccgctccgttttgtgaagcgcaaggatctgcaaattgtgctcggcttgatcacatcgaaatacggcgagcttgaaaatcctgaggatgtgaaacgccgtatcaatgaagccgcgcgttttgtcagcttggaccagctatgcctgagcccgcagtgcggtttcgcctctacagaagaaggcaaccttctgacagaggagcagcaatgggcaaagcttcgccatgtcatcgacattgccaacgatgtgtggagataatctatcattgacagaaatagaaaatgtgtgaataatagatactatcagaaaatttcataaaaaggttttccttatcaagagaggtggagggactggccctgcgatacccggcaaccgctgtttaacagaatggtgctaaatcctttagagcaatgattgctcttgaagataaggttgagattgtcacgcaagctcttccttatccaaaggaagagcttttttacatttgaatggaaagaaggaatggacaacatgtcacaacaaacaacacccgcagaacaaaaatcacttcaaagaaaaaaaccgccgtttcgcgcggatcaagtcggaagcctgttgagatctgagcccgttaaaaaagcgcggctgcaaaaagcggccggcgatattacggctgagcagcttcgccagatcgaaaacgatgaaattatccgcattgtggaaaaacagaaggaaaccggcctgaacgtcgtgacagacggtgaattccgcagagcatggtggcactttgatttcctggaaaacttagatggcgttgagccgtttactcctgagcaaggcattcaattccataacgtacagacaaaagcacgcggcattaaagtcacaggtgatatcgacttttcaactcacccaatgcttgaagattactcatttctccatagcattgccggtgacgcgacgccaaagatgacgattccaagcccgaatatgctgtttttccgcggaaaattggaaaaaggtgcatacaaaaacgactatcaccttttccagcatgatgtatccaaagcatataaaaaagcgattcaagcgttttatgacagaggctgccgctacctccagcttgatgatacagcgtgggccgttttcttatctgaaaaaggcttaaaacaaatcgaagcgttcggaacaacgcctgacgagcttcgccagctgtttgcgaaatcgattaacgacgcgattgcagaccgcccggatgacttgacggtaaccatgcatatttgccgcggcaacttccagtccacttggacagcggaaggcggctatgacgcagcagccgaaaccatttttgacggcttgaatcttgacggacttttcttagagtatgatgattcacgctcaggcggatttgagccgctccgttacgtaaaacggtctgatcttcagcttgttcttggcttagtgacatctaaattcggtgagcttgaaaatccggatgacgtgaaacgccgtatcgaagaagcgtcccgttatgtaagcttagaccagctttgcctcagccctcaatgcggatttgcttcaactgaggaaggcaacaagctgactgaagaacagcaatgggcgaagctccgccatgtggttgagatcgctaatgatgtttggaaataagaaaagaaaaaacacacttgattccctagcggagcaagtgtgttttttatgtcattgtgcggtgtagcccccatcaaggacgacagcctgcccagtgacgcccttcgccttctcgcttgccaaaaacacggcataatccgcaatttccttgacggaaagcagtcgcttttgcggcacaagcggaaaaatgacttgttcaagtacagagtcgtaagggacatttctagttttcgatagatcgctaagctgattgcgtacaagctgggtatcgacataacccggacagagcgcattgactgttatgccgtggggcgcgccttccagcgcccctacttttgtgagtccaatgacgccgtgcttggcgctattataagcggatttccctgcaaagccgactaatccattaacagacgcgatattaatgattctgccaaactgctgttttttcatgatcggaaaaacatgcttcattgcaataaagggggccgtcagcatgaccttgatcagctgttcaaaggtgtctgtcggaaactcttcaatcggagcgacgtgctgaataccggcattgttcaccagaatatccaagcggccgtattgtttttggatgacgttcaccgtatcagcaacttgcgcttcctttgtcacatcatacggaatggccgccgcgtcaaagccttcttctgcaagcttggaggctgctttttcacatgcttccggacggaggtctgaaacgatgacgctggcaccttcccgggcgaattctcttgcgatttcgaatccgattccgccggcagcccctgtcaccaaagcgacttgttttctcatgtcaaacaccttcccattaagaattgagtacagactggcttacagcgaaatcagcttctgttttttcataaacctcttcaattgtgacaccatcctgaagctccgtcagtgtcatgcggccgttcacaaaatcaaatacagccaaatccgtaatcagcctgtgtacgactttctggcctgtcagcggatgagagcatgtttttttcacctttgattcaccatgcttattgacgtgctccatgatgacaacgattcgtttcgccccgttgacgagatccatggcgccgcccatcccttttaccattttgccggggatcatccaattggccaaatcaccctgctccgaaacctccattccgccaagaatagccaaatcgatatgcccgcctcttatcatcgcgaatgactcagcgctgtcaaaataagaggcgcccgtcacttcagtgatcgtttcctttcccgcattgatcaaatccgcgtcttccgttccttccagaggataggggccaattccgagcaagccgttttccgactgaagcatgacgtgaacgccatcgggtatctcatttgcgacaagcgtcggcattccaatcccgagattcacattcatgccgtccttgatttcttgtacagcccgtttgaccattcgttttctcgcttccttcacttggcctcaccctttcccgatgcttgctgaactgttcgtttttcaatccgtttttcttggctcgcgccaagcacgacatgctgtacgtaaattcccggcgtatggatatgatctggatcgagctctcctgcttccacgatttcttccgcctcggcaatcgtgatcttgcctgccatggcggcaatgggattgaaatttctcgccgttttcctaaaaaccaaattgcccatggtgtccgctttccacgctttgacgatcgccacatcgccggtaatgcctcgctccagcacataagtccggccgccgaatgttttatgttcttttccctcggctatggaggtgccgacgcctgtcgccgtataaaatcccggtatgcctgcaccgcctgcacgaattctctcagcgagcgttccttggggaacaagctcgacctcaagctctccgcttaaaaactgccgctcaaaaattttattttcaccgacataggaagcgatcattttcttgatttgcttgttagccagaagcaaaccaagcccccagtcatcgactccgcagttattgctgacaacggttaaatcctttactccctgatctcttatagacaaaatgagctgttcagggatgccgcacagcccaaaccctcccgcgatcagcgtatccccatcatgaatcagtttcgcagcttccttgcttgatgacagcactttttccatattgatgcccctttcgttttcttctacactagaccagtcaggctgtaaatcgcgatcacagcaaatacggcagccgttttaatgagcgtgatcgcaaaaatatcgcgataggattgccggtgggtcaaacccgtcacggccagaagcgtaataacggcgccattatgcggcagtgtatccatcccgcctgatgccattgaaatgacccgatgcatcacctctggcggaatattgtaagcctgaatcgcctgtaagtattgttctgacatcgcgcttaacgcaatgcccattcctcctgaagccgagccggtgattcccgccagcgcagttgtcgtaacggcgccatttacaagcggatcggtaaaagtatgtgaaattccgctgctcagcttatgaaaccccggcagtgcggcgataatgccgccgaacccgtactcggcacccgtattcatagatgccagcaaggcgccgccaattccttcattcagcccttccttcaattgggcaaacacacttctccaatcaaataaaatcgttgtgatgatgccaatcactaaagcaatctccaccgaccaaatagcagctgctgaagaaatatcaagcctgccgaactcctttaatcctatggaagaaaaatcaaatccattcggataccactttggcaggtaaatggtaaaatatttattcactgcaccgacgagaataagcgggacaaaggcaagcgcgtgccgaatcgggcttttgtccggttcagccgcggactcaatcgattcaggagcaggagcattctgcgaatcaaaaccgccatagccttcgccagatgcctgcgcttttttccgccttgattccaaatagagcatcccagctgccagcacaatcactgcgcccatcaagcccagccaaggggcggcataaatgtctgttttgaaaaacgacgtcggaatgacattttggatttgcggcgttcccggaagtgcgtccatcgtaaacgtaaaagcccctaaagcaatcgttcccgggatgaggcgttttggtatgtttgcttcttggaacatgtttttcgcaaaaggatatacggcaaatacgacaacaaacaggctgacaccgctgtacgtcaagacagcacccatcagcacaatggcaagtatcgctctttttgccccgacaagccggacaattgttttcgcgattgatgccgcaagcccggccatttcaacgacctttccaaaaatggcaccgagcaaaaacactgggaaatacagcttaataaaacccgccatcttctccataaaaattgatgaaaaaaaaggaagcacatggcttggatctgtcaggagcaccgcgaataacgcgcaaatcggcgcaaacaatatgacagaaaatccccgatacgccgtaaacatcagcaaacctaacgccaatagaatgatgatcagttccacacacacatcccccgtttccgcgaactagaaagcgtttacaaaaacctgtccgcatcggctgtttccgtcccctttccatatgtacgagaagcgtgggccaactattccgattaaaaaaggaaagctccttttttcggagctttcctctgccattcatttcattcctattaggatatcaacatcaaccgtaatatcggctgttttcatctctttcaggaggctgactcgatctttcggcgccgaccaggcaagcggcgtcatcttgagaagccagtggatcgcctgctggtcaagcgttttaacatagcgcagcctgacaggacggctgtgtgcagcatttgctgcaaaacgctcaacagctgccgcattggaatacgtgcgccttggtgaatcagtatataaaaattgccttaattctattaaatagtcgcttcgcggcactacttttacgagcatgccatcattcttcagcagtctatgaaactctgcataattggacggcgaaaaaatagacagaacaacatcaaattggcgatcatgaaaaggagcacgcgccacatcggcaaccgcccacatctgatctttgaatgccttagaagcttttaagatcccatccttcgaaagatctatgccggttcctatcgctgctttccctgcataatcaaacccgcaaagcgcattcaaatgagaaccctcaccgcaaccgctgtccaggatggtgaatgcctcatgaccagatgtgggatgactgatgagttctgcaatcgcatcatggagcgggtcaaaaaaaccacattctccaatcagcctgctcctcgcttcaaaaagctcggcaccgtaactggttttgaccggcttcgtcagaaagttcacgtagccgtgccgagatagatcaaatgtatgtcctcgttctgtacaaatcaagcttttccctgatgccgcatccatagaagaatcgcagagcgggcatcgaaacatgctgaaatcaactgttcgcttcatgataaaaaacaccccattcattcatttttagataaatgaaaaaggcatagacaaataaacctaggcctatctcaaaaattggccaggtctggcagtttgtctacacctgtcattatctataacgaatgaattggataatcatgaaaaaactccctttctgctgtatgggtttccccatttccattatacaacaaatctccaggatctggaaccttatagtgaagaaaaatcagtactgacatgctggtatcccgccaacatcatatcagcatagcaatccagcatgtttttcctttattttctcattttagaatataaattttattattgtgaaaatagttaaaaaggttgattttcaaaaagtgaaaggataaaatactgctatcatcttagaaaaagacattcttgtatatgatcagtaatatggtctgattgtttctacctagtaaccgtaaaaaactagactacaagaaagtttgaataaatttgaacgagttgaaaaggacaagttcttttctgtttgctcttatttttcacactttctgcacttccagaatttgtgaagaataagagctttttttgtttccataataaccctcataggagttgctatcatgtactttttactaaaccttgtcggtctcattgtgattatggcagttgtattcctatgttctccgcagaaaaagaaaatcaagtggcgcccgatcatgacgttaattgttctggaattgctgattacttggtttatgctgggaacaaaagtcggaagctgggccatcggtaaaatcggtgatttcttcacttggctgattgcttgcgctagtgacggtatcgcgtttgcctttccgtcagtaatggcgaatgaaacagtagactttttctttagtgcgcttcttccaattatctttatcgtcacattctttgatattttaacgtatttcggcattttgccttggctgattgataaaatcggatgggtgatttcaaaggcttcccgcttgccgaaattagaaagctttttctctattcaaatgatgttcctgggaaataccgaagcacttgcggttatccgccagcagctaacggttttaagcaacaaccgcctgctcacattcggcttaatgagcatgagcagcatcagcggctccattatcggatcttatctttcaatggtgcctgcgacatacgtgtttacagccattcctttgaactgcttaaacgcgctgattatcgcaaacctgctgaatcctgttcacgtgccggaggatgaagatatcatctatacaccgcctaaagaagagaagaaagactttttctctacgatttctaacagtatgcttgtcggcatgaacatggttatcgttattttggcaatggtgatcggatatgtcgcattaacgtcagcagttaatggcattcttggcgttttcgtacatggcctgaccatccagacaatttttgcttatctgttcagtccgttcgcattcctgcttggactgccagtgcacgatgcgatgtatgttgctcagctgatgggcatgaaattagcaacgaacgagtttgttgcgatgcttgacttgaaaaacaatctcaaatcccttccgcctcacaccgttgcggtggcgacgacattcctgacgtcctttgcaaacttcagtactgtcggcatgatttacggcacgtacaattcgatccttgacggagaaaagtcaacggtcatcgggagaaacgtgtggaaactgctcgtcagcggaattgcggtatctttattaagtgctgcgattgtcggcctgtttgtgtggtagaaacattgagccatatcccttttcggatatggctcttttcattattgataaatagaggctggcacctgcacatcccggattcccgctgcataaggccccaagtcatactggccgaagacgatggcgatcccgtttgccgtaaagtaaaacattgtgtctctgtttagggttatatcctctttctttacatcagggaaaaacagctcatcgtgttttttgatatagctatataggtaatctctcgttttgctgacttttgttttggtgttcagaatctgatccagcgtcacccgcttttgtgctttcaagtcatagttgaaggactggacagacgttaaaccgtgggcgccccctgaatagatataattgagtgtttgaatgctgagcttgcctgccgcattgtatttgacgctaaaggatgtttgatattccgttttaaagccctgctgttcgcctgcttttttgtttttcaggtattcctgatacgattgttcaatgtaggctttcagctcttgattgattttcttttcaaacgcggcattcccgatgtgatgcacttgtggatacgttaactccttgatctttttgtacgtatgagtgctgacagtcggtgttttcgtttgaactgcgtttagagatggggccgcatatgcaactacggaaaaaagcaagactgcaatccccgcggctttcatcattttattccatttcatacaatctcctcctttgatgtcgttgtttatcattcccttatttaagcaatacacacttttatagactgattaaatcgaaagaagtttctaggtctaacagcatgatttttccaataaaaaaagagacacaggatgtctctttttttactgtttgcgcccaaaaatcgcttcatgaacggcctgtgccaaatctgtatttccgaacatctctaataccgcaatgacagtctggtccggaatgtgctctgcttcgtgttttggcacgaccagatcgtccatggtttttttcaagctttcattcagcttttgctgcggatacgctttggtgtacatctccaccggatcaagatcatggttcacgcaccattgggcaaacaccaaaatcatcatattttcatcgcgttcgtaagcttcagcgagctgtttttcgttcatttgtcatgctccttatgaaaagtatcttccttaaagatacaggagccgatcaaattcgtctatcccaatggcgatgagcagaaaccgcatcgataaatgccttgctgaaagcggtgtagtcaggttcatctttagccgttacgatgcctggcccctctgttgtcccgacagaggattgaagaaggtcaattccttcatttgccgcaccgatcgccttgtagtgattgtaagcttctctgataaactccatcgcttgtttgttgtcttttaactccggccctcctgcggcatagacggcatcatacagaacagaatcaaccgtcaggaacgtgccgctggcctcaagctgctgtccgctgccgcttgtcatataccccagattttgactgatgatatctactgtgattccttcttgctttaaggcttccagcactgtttgcagctctttttcatgaaatccgtttccggtgagtacagcgacttttcttgttgacgcggttttcactgtacgggcttggcttaacgcaggcgaagtaagaatttctttagatgctttacgcttcgcgggcgccgccacgcctactcctttggcgatttcttctgctaaatctgcatcgacattgctgaagacatcaacaacctgccgctgtacgtctttgcttttgaccttcccgacctcgaagcagaaagcagaaatgatgtgctgtttctccacaggagacatgctgttccagaaaagcttcgcctgtgagtaataatcgttgaagctgtcgcttcgctggcggatttttttgccctcgactttttcctgatagtggacgtagccgccttcttcagctgtcgcaggcgacggatcattgttttgcagtgagtttttatgataagcgacaggccccttattgatcgtcatccgatgataaccgtcatattgattgttatggaatggacataccggccggttaatcggaagctcatggaagttcggaccgccaagacgaatcagctgtgtatccgtataagagaaaagtcgcccctgcaatagagggtcatttgtaaaatcgatgcccggcacgacatttcccgggtggaatgcgacttgttctgtttccgcaaacacattatccgggttgcggttcagcgtcattttcccaatgatcttcaccggcacaagctcttccggccacagcttagtcggatcaagaatatcaaaatcaaacttgaattcatcttcctcatcaatcatctgcacgccgagctcgtattcaaccttgccgccgttttcaattgtttcccacaggtcacggcgatggaaatccggatctttcccggcaattttctgcgcttcatcccatacgagagaatgcacgccgagcaccggcttccagtgaaatttcacgaaacgtgcctttccttgttcattgacaaaacggaacgtgtgaacgccgaagccttccatcattctgtagctgcgcgggatgcctctgtctgacatcgtccacatcaccatgtgagccgactcagggttattggcgacaaaatcccaaaacgtatcgtgagcagtcgctgcctgaggcatttcattgtgaggttcaggcttaaacgcatgaaccaaatccggaaatttgattgcgtcttgaatgaaaaacaccggaatgttatttcccacaaggtcatagtttccttcttcagtataaaattttgtcgcaaagcctctggcatcccgcaccgtgtctgcggagcctttagaacccgcaaccgtagagaaacggacaaataccggtgtcttcaccgaagggtcctgaagaaatttggcccgtgtatattccgtcattggttcgtaaacctgaaaaaagccatgcacgccatacccgcgtgcatgcacaacgcgctccggaatcctctcatggtcaaagtgcgtcattttctcccgaaagtgaaaatcctccatcagcgtcgggccgcgaaccccggcttttaacgaatgctcatcctctgatactcgcaagccttgatttgtcgtcattttcttcccgctgttatcggtcctgtactgctcaagctgctcgtcctttgagtgttcatttacacgtttgttttggtcatcactcatgtctgctcccccttttaaaacgaaacattctacagcacatttacccgtggcgttcttcatataaactgctaatccgctcattaggatttttggtctacatataaatatgcggtcatacacatttgaaataagccttcttcacagaaagaaaggatggaagcgcttaccaaaaaagctgttgaataggggaggtcatatcatgcttgccatactcggttttgtgatgatgattgtctttatgtaccttattatgtctaaccggctttccgctcttattgctttgattgtcgttcctattgtgtttgccctgatcagcggatttggcaaagatctcggcgagatgatgattcagggcgttacagacctcgcccctaccggtatcatgctgttattcgccatcctgtatttcggcattatgattgactcaggcctgtttgatcctctcattgccaaaatcttatcgtttgtcaaaggagatccgttaaaaatcgccgtaggcacagcggttctgaccatgaccatttcgctggacggagatgggacaacaacctatatgattaccattgcagcgatgctgcctctctacaaacggctcggcatgaaccgtttggtgttagcgggaatagcgatgctcggttcgggggttatgaatattatcccgtggggcgggccgactgcgagggttttggcttccttaaaattggacacgtcagaggttttcacgccgctgattcccgctatgatcgccggcattctctgggtgatcgccgttgcttatatcctcggaaagaaagagcggaagcggctcggcgtcatttcgattgatcacgcaccgtcttccgatccggaggccgcaccgctcaagcgtcccgctcttcaatggtttaacctgctgctgactgtcgctctgatggccgcactgatcaccagcctgctgccgctccctgttctttttatgactgcgttcgccgttgccttgatggttaactatccaaatgtcaaagagcagcagaaacgaatctcggcgcatgcgggtaatgcgttaaacgttgtctcaatggtgtttgctgcgggcatattcacaggcattctctccggcacaaaaatggtcgatgccatggcgcattctctcgtttcactcatccctgatgccatgggcccgcacctgccgttgatcactgcgatcgtcagcatgcccttcacctttttcatgtcgaatgacgccttttacttcggtgtccttcccatcatcgccgaagccgcttccgcttacggaatagacgccgctgaaatcggaagggcctccttgctggggcagcctgtgcatctgctcagcccgcttgtgccttccacctatctattggtaggaatggcaggcgtcagctttggcgaccatcaaaaattcactattaaatgggccgtaggaacaacgattgtgatgacgattgccgcacttttgattgggattatttctttctaaatgtatgagcttgatcgtagcattgagtgagtacgtgatttacagaggggagaagatcaaataggatattatgagtgaatagaagattcatgccaacaacttctcattacaatcataagagcctgctatattgcagcaggctctttcacatttggcattatttttttgtatagcgcacccagtcataatgagcgtatagcggatttacaccattgtaggaaccaagccattcatcgacacccgtgccattccacaagttcatcatgatctttccaggtgttgtcggaatttggtttgttgcagtatgttttaattgcccgtcgacataccatttaatagagtttggctgccaatcgaatgcataagtatgataggcattggctgcatcaaacccgagatcaacaatcttctcatggtttcctgcaccatttgtataatagttaaattgaaccttcgttgtgtcttttcctaaaaattcgatatcaatctcatcccaaggagttccatctgttggacctgtgtaagtgaagaacgatgaaacgatccctgtgtttttagctggtttcattctgacttcataaagtccatagccatatgtttgaacagaacggttttccccgcagtcaaacttgttataagctgggcttgttagcgctaaacgcatttcacccaatgacgtcattgatacgttattagcccgccacgtgcagttgaacatatttccattcgaataaccatctgctttttgccaaaaaccggagttatagccgttaaaagggtcaaaaaacgatccacctgtttgagctgaggcagtagaagtgactgcaaacaaactcataaacaatccagtgacaagaagcagcaacactcgtttcagataaggcatattggcattcccctttcattgaaagcgttttctatgttgatcttacatgattcttttaaaagggaacatcggtcaaaataatgataatatcgaatcttactgacttgaatcctgtaactatcatcatcttccctctgaaaaaaataaaaacctaaattaccatcagcacagacagagatgatccgcactcattgtaatttaggttttgcctgctttatcagtaacaatcctaccattttcatatgtgaatgtaagaaaaaatgaatacaaggaaacaaaaatgtcagcgctctcattatgcttgtttaactaccctttctatgtgaatggttaaatacagcagctcgtcacttgtgagcttgtgctcatactcccgctcaatgtaggtttggattttcttcgtgcattcatacgcgcgatgatacttttctttcactgtatccagcaaaaaatcgtcctggctttccatgtgagtgccgttaaaaagacgctgcgcgaaaaactttaagtgggtgacgaaccgataatagtgaagcgattcttcgttgaattcaatcttaaaatggtattttacaatactcaaaatctcttgcatgacttttgtaatgttgataatattgggcatctcttcattcagctcggcatttacaatatgcagagcaataaagcccgcttcatcctctggaagagacacacctgtcttgtttttcaccatgaccaacgcttctttgccgatcgtaaattcgtctttatacagccgttttgtttcccacagcaaggcgtttttgatatcaagccctttctggttgcgctggatggcaaagttaatatggtcggtcagcgacacatagatgctgtcgttgagctttttgccgagctgtaattttgcgtagctgataatctcttcggatacttccatacactcgatcggtatatcatacaaaagggttttgaacttttctgatacatccttgttatcgagcgtgaacactttctcaatgcgggcttcatcgacatcatcgccggactttttctgaaacgcgagccccctgcccatgacgaccaattctttcccttgttcattgaccacgctgatcacattattgttgatcaccttcgcaattttcatgacatgtccctccaatcaactaagaacagactatatcttgattgtacattctttttgtactaggtcaatatcatcagggaaagacggaagctggtcagtacaattcactccgtacctgctgcccgggctgtttttgaagcagcgcctccagatggcgttcaaatgatgccttgtcagctttctgctttttgacaatgctgttcatgattttgacgctttcggcgctgtattgtgtatattgttttttcagctgatccagctgctgtcttgtcttcttcgcgtttttcggtgtgacttggccgatgagtttgatcatactgtctgcggtctcaaaaaaaacggctctattttctgtcagctgctgaatttcgatccggctcatgtcttgattacgcgttttttgtagcaaggcgaccgcctcgctgttttgttttttgagcgatttgttctcaagcttaatcgattcgagattctccttcgcaatgtctgcttcttcttcagtcatgttgcttcgcacgaagtattctggattaccgattccataatcaaatgcttcgctcacttgtatcatggaactgaacacaatggccagctgcctgtcgcttgcgagggcttggaaatcctgctttttcttactgctcatcggtttggctgcggtttgttttactgtcttttgatcacagtctgcgaacatctgagcctcaccttcactttcgcatgcgctcatcacaagaactgtgaccagcaggcttatacacaagcctattcgcctcatgctctgtctcctctctgctgaatcccttctggaaaataccataaaatatagttaaatggtaccagattcacctaaccccagcaataaatcaaaagtatgatttgaagcgcaaaaacataaatattttgtaaaaattgacgtgcattccattcttttcaggcccatttttcgtacaatagaagtatcgttaccggagagggggctctgatgatgaaacgttttacgaaacaagaaaacagctgggtattatatgactgggcaaattctgcttactcaattgtcgtgaccaccgcggtatttccgttattttataaatcagcagctgcggaaagcggtgtcagcgccgctcaatcgactgcctatctgggctataccattgcgatttcaacgtttattcttgcgatgctcggccctattttaggcacaatcgccgactatgaagggtgcaagaaaaagttcttcggtttctttgtgtcagtcggtgtcgccagcaccgcgatgctcgcctttatccctagtgaacattggctgctattgttgctgttttatacgatatcggctatcggtttttccggcgccaatgtgttttatgatgcctttctcgttgacgtcacgcctgagaagcggatgaatctcgtctcagcacggggttttggcttaggatacattggaagcacgattccatttatcatcagtattgctgtcatcctgctcgcacaagcagagacgattccagtgtctgtatcggccgcaagccagctgtccttcttcataacggctgcctggtgggggctgttcaccatcccaatgattaaacatgtccatcaacgctattacatcaaaaaagaacctcatattgtcatcaacagctttaagcggctcggccaaacgatgaaacggatcaggcaataccgggcacttttcctcttcttgctcgcttatttcttttatatcgacggagtcggcacgattattacgatgtcgacatcctatggatcagatttagggatcggctcctcaagccttctgatcatcctatttgtcacccaggtagtcgccgcgccgttttcgattgtatacggaaaactggcagaacgcttcacggggaagaccatgctgtacgtcgggatcgtcatttatatgatcgtctgcgtgtatgcctattttatggagacaacgcttgatttctggatactggctatgcttgtcgccacctcgcaaggcggtattcaagccctaagccgttcctatttcgccaagcttgtgccaaagcgccacgccaatgaattcttcggtttttacaacatttttggaaaattcgcctcaattatggggccgctgctcattgccgtgaccgcccagctgaccgggaaatcctcaactgcggtgttcagtctgatcattttgtttgtaattggtattgtgattctggcctttgttccggaggagaccagcgccgatgtcagccagcagcaaaatgacctgcccctttaactgggagcaggtcattcatcatttattcgctttattcaccttcagctttttccctttgacggttgtgttcttcatcactttgagaacatgagggcctttaccatttaagatctcaacgtatgaggcgttatccatgatcgtgatgatgccgatgtcgtcagctgacacaccgtcaattttggcaatcgttcctacaaaatcaacggctctgattttctttttctttccgccgttaaaatacagcttcataatgtctttattcagctcttcgcttttgtcctttttgctttccggacggtcattcagtttagctagaaattctggtttcttccttgccacttcctcttgagaaggtgcttctattttttgaatttcaaatccgatatattcttcaatgtcggctaaaaaccgtttttcgaaggccgtgacaaacgaaatggcctttcctttgttccctgcgcgtcccgttcggcccgtgcggtggacatagctttccttttcaaccggcagatcatagttgataacaagggagatattttcaatatcaatcccgcgcgcggcgacatccgtcgccactaagtaacggtactcgccacgtttaaattcattcatgacgtcgaatcggtcttcctgaatcattccgccgtgaattttatcgcatggatatcctaagtcatccaattcatcggtcagctgattgacgtgctccttcgttcggcagaaaatgatgcagctgtcgggattctccgtcatcagcacatctttcagcaatgaaaatttatgctcttctcttacttgaatcaccgcatgttcaatatttcttgtggtaagcccggccgctttgatttcgatatgctcggggttttgcatatattgacggctcagcttctcgatatcctgcggaagcgtcgccgaaaacagcatcgtcgtacgctcagtcggcagatgcttgataatcgcctccacctgctcaatgaagcccatattcagcatctcatccgcttcatcaatgaccaaataagagagacgatccaacggcagcgtgcctttttcgatatgatccagaacacgtcccggcgtgccgacaacaatgtggcttttttgcttaagctcagctttttgtttatcaaaggaggattttccaaatacggctgtcgctttgatccgtttaaatcgtccgatgttcgtgatatcttcctttacttgcaccgcaagctcacgggtcggtgttaaaataagcgcctgcggcttgttttcatcccaattcgccagctcacagagaggaatcccgaacgaagccgttttcccgcttcctgtctgtgatttgacgacaagatcctttcgttcaagggcagcggggatcacactctgctgcaccttggtcggttctgtatatcccagtccttccaatgctcgtaaaatgtcatgactgatttgatagtttttaaaatgactcatgtataaactcctgtctcttgcagatgttctcattatactctaattgaccaaggcatatgtgttttgtcgaaaaatgatgtattaaaagccagcgattccctggcgttttagctcctgaacagccaatcgcgccagtgcgtcggcccccgcgcgattcgggtgcagcgtatctccatccatataaagcccgagtgttctttccggaccgatcgatgtaaagtatgccgagctgaggacatttaagtcaatgagatatgttttttcctcttcggccaaagctaaaatagaggccctgtaccatctgtttacagacgaatggatgccttcagaagtaaaatcggttgcccggccctgaggcgttgataggatgacgtccgctcctttcgcttttacctgacgaatcatatcacgcatcatctctttaaactccgcttcagattcattatgcttcggatttgtgtcattaatgccaagctgcaatataaaataatctcccggtttaatatacttcaggatcgcctcaagctgtccatcatttctgaaccctctcgcgatctgcccgccggacgccatgtttctcacttgaaaggtgtgtttatcgatatagtgaggcagcatctgcccccagcccgcctgcttgctgctgttgagcggataataattgcacaccgtcgagtcgccgccgacataaatggttcggttcgtcaccggctgatcagacaatttctttattttcaaggcgctaagcgtaaaagcggtgccggctttcccctctgtcaccagtagattcagctgcccgtcggtgacaggaatttggaacgtatcctccgcgccatcccctgtcatattgatgacctgaaacacgccctccgccgccacactggcccttgccgtattgccaagcgtcgccttcacctcataaaggccgttcgggagatccacttgaaacgtgttattacttttcgtcccatacgctaaaaactgaaccgcatcactcttcactccagtcccagatgctgccacatccttcatattctctggtgtttgaaagccgtagccctttgaccggtcataccgattagacgccctgacaccaatataaccaggctcaaccgaaccgtttccaaagtcaaactgatacaccttctgctccgctgccttcacactctcattcccgtcaaaacccaacatcaacatcatcacaaaaaccgttgccatccattttttcatcaagactccccctctatgaaaacgcatacattaatgcatactcggtgattgtttctttatgatgactgaatgaagaaaaaaatggcgttgaggaataaaaatgaggggagagtctcaagaaggggaaaatcagtgtgacttcttgtcacacttgatcacatcccaacctccgcaatagaaactcatctgatcttcttgatcatacacataataacggagtctttcccattgatcgtcagtcggttcaatctccaactcaaccgcatcaatggattcaaggtcatccagccttgatgcactaatgtcttcaaaccgcaaatgaatgtcacaggtttgagctgatcgttttcattcaaacacaggaatatgaatataacgatcatcttctttcatatagaaagaaaactcgtttaatgtaaatggacctgtatcctcatcagaaagatgctttttcaatttctcgtattgtgtgatattcaaatgaattcctcctatttttagttacctccaaccatatagatctccgcagcatcgtattcaaaccatatgatccgttcgcctgagtccgttaggcattggagcttcccttctgaaaaatagcttttatccggttggggatcagtgatcagaaaaacatcatcattgatggaagctaacagaaagagaaaatctgcaatatcccggtctgcttcctgtaatatggattggaaatggaattcccttttgtccagcttcgtcaccttgtaagcatgaccttcaaaatactcggacaggtcttctataaatgaaccagtcgttattacctgtatcatgattcgatcgtaggcaagccctgcccaaaaacgataaaacgactctgcatctttaagttcgcatgacataacggtttggtcaggcttaagctcgatcatgtccaaattgccaatactgcttatagaggttatttccataaaatcttccccttatcagttggatagcgcaacgcaaatctcttgtctgacttgttcatacaagagaatatgatgatacagatccttatcgttttcgatcatatccggaagtatgtcaggatacagctcaaaaaagcttttctccaacgaacgccgctgttgccggggcatccttttattcgccagcacataatccaaactgccatcaacaagcataaaaaactcatagatttccgcttcaaagccgtacaattcactaggatacggcgtttcttcaagctctcgctgtctttttttcagtttttcaaacacgccgactctctcctccgacacatgttaaataacaaactaatctatcttgaaacaggataggcggatatttatctatcgcctccaacaggtcttcaccaaacacagtgattgtcaatttccacgggtctcccaaaagtccccaagagaagtcctgatgaaaaaagaaataatagtctccatttggaaatacgggaacaggccattcgccaaattcatcctgaggcattgcctgatgagggctaaacatatatccgtcatgctgccaatctagtgcgtacattacttcgttctttccagtacctaattgaaatgcttttaaaatagaagcctctaaatcactcagcactccactcacatcattatgaccagctttactgctcatcgcgcttgagatatcaaacactcgatatggctcaggcggaatgatgtgatgccatctgcttccgggtttccattttatgagcttgttcacttctgaccagatgcggtcttgttttgtctgacttaaagcgcgccaattcatcatgatctcatccctacacctattggatatcctgtttgtaaacaccagaagaggccactgcataaacagcgttacttgtcagtttcagctgttgaacgtctagggcttcaccgttcgagtcacagcatgttatctcttccatctcttgactcacatcggcagaaatcaaataaagagacgactcaagctcttcactgtaacaattgaacgtcccaaccaaaaaaccttcttcagatatcgcaagctgataaaatgcttctgagttcggctctttatccgacagaatccatacccgtctcacgaccgtgtcgtcaaacgcggcaatgactgcatctccgtaatacagcatataaatcaagccgtttttttctgcaagtccataacaatcatctacagccggcgcatccatttcttcgagctttctatcaaagtgtatttccttctgctgaccatccaaagtaaaacaccaaacactatgcccatcaggattttcatcatcataaatgccttcatcatttaaaccgacccaaaggttttgtttctcatccaaaagacagcaggaaacccctgaaggcaagtgaaaagcacttttcactcttccctcttctgaaaaaacctttaccttcggctcatacgattcgtaataaacgaagacatagccatctgcacattgttgaaagagcagaatatcactgtatgaaatctgctctttggctttaaaaacccgaatatcaccggaaggatcatagattgaaatggtcacatcatctttcacaccttttccaatgtagacacgccccagtggatcagcatggaaaaaacaatcttgggtgtccgtgttgatgactttattcatttttaattttttcatttgttatgctcctaggttagaaatgaagtgataattaagcatttattagctattagtaacggacagcctagtttcattaatcgttttgatataaagctactttccaattcagtcttaaagcatttagtatttaattggtatgcataaaacgattgatcatcaaagcgaactgtttcagcttcaatagcaatcagcattctgttcatgtcaataagaaagttagcatttgattgatactccggaattatataatttgatagattctcgattccttctggatgataactcatctcaaatacttgccaactgtattcttccggatctattttttccaatctcatgtcgccaacatctgcactataataagcggatgccacattttgaaatgatattttatgcgtatattcaccttcatcttcaaaaaccttaatatcaagtgagagttcttttttaaacacattaaaatctaaatgaagaacactgcacccctcatctatataatcaacccattcattaatcgtttgatacattgtcatcccctgcttctttttaatcaatagcgcctttccaccaagcagaaagcaaattactccgtatattgtttgatccaatcatttaaatcatctgttgaatgcaaataagtttcaggagaatctttcaaatcaattccgcttaaaaggattaacatatcccagactctaccgttttttactttagggtcatccgcataaatataagggcccgcccaatctgacacttcttctcttgttgtttgtccatttaagacacttttgattttatttatgcattctagtagttttggctcgatcaaattgatcaccacgcactcaatattcgtttggtataccgacaattctatttattttattaaagcctgctgagcaatcagatgatcaacagacaattcggtaaaagatcctctaccgaatgaattctattattcgctttgaagatccaaacaaagtatttaataaatgttattctcattaacaataattgcatttttatattcttctgctgatgttttcataaaagaaatttttttatgattaaataaagtattagtttttaaatttgcagagtatatataatcattactatcgctttttaataccaactaagttttcaatatattatatgctctattgttttatttttttcaagccaatcatagtcattaagagttgatatttcatcaaaatagtacattcacttttccttttactaattgagaaagctttttttcgcaccaagaatttgaaataactgtattattgatttaacatgttagcttcattggaataggattacaatatttttctggaacgtttatgttattttaagaatcaaaaaaaggccgcataggcctttttacattttccattattgcatttgttcaatatccgtaccctcagctgtcacattcgccttcccctgcctcctgacaagcgtcaaggccatgcccgcaaagatcattacgatgccaagcgtttgatagaggtcagggcggaaacctgtgaagacggtatcgagcacgattgcgacagcggggtcgagaaatacaatgattgaaataaatttcgttgataaaaatcgtaaactgtcaaaaaacaacaaatatacaatacccgtatggatgatgccggtagataccaccataatccagtttccctgagataggtcagcaaaagcgccaaagtgaataaacggaatcaggatgataacccctaaacccgtctgcaagaaggtggtcgtgtaaggactgagattgtgaatgccttttcccaataaagtggtgaacgcataaaacagtgcggcgagaactgcccatatgatccctgatcccatcagctgtgtcaatgaagtgctgccgttaatcccggaaatcagcgcagttcccagaaagcagatgataatggagctgacggagatcacatttaatttctctctgtagaggaagctacccagaagaagaacaagcaccggcgctagatgataaacggagatggcaattgtaacggacgtttcttcaaaagacttaaataagaacacccagttgaatacaagaaagaaaccgcacaccaatgtttgcagcacgtctctcttgctccatttttcagttttatactggccggacgccagccagcaaaggcctaaaaacagcgtcgcgcaaaggcagcggacaaagaccaattcaaatgacggcagattagtatgctctgagaaaaagccgatggagccgaaaatcaccatagagatgaccattttgattacggctgttgttgatttttgttttggtgtgattgagagatcttgctgcatcaagcgtattctacctccaattatgtatagggaaaagcaccccaactgcaaggtgcttttccttttttatagtttcttgccggccgtccagccgccgtctatgacaaagtttgaacctgtaataaagtgcgcctcatcagaagccaaatacttcatacaggaaacgatatcactcggctgcccccacgtatgaagggcatggttatctttgatcagctgaaccatttcatcgtcttgaaaatactcttccgttaattctgtttggatcacgcccggcgaaatgctattcaccctgatcccctttgatccgaactccatagcgagctgcttcgtcagtccgatgatcgcatgcttggaagacacataggcagcccgcgcaggctctgccatcagcccggacacagaggcgatgttgattatacaccctcgtttccccagctttgaccacagccttgccgcgtcccgagaaagaataaaggctgccgtgagattaatgtctatgacctttttgaatgattctgctgataattcaagaacaggggtaatttcccttatccctgctgcattgatcaaaatatccgggatcagccggcttttttcaagttttagcatcaaagattccgcctgccggacatcagacaagtctgctttttccatgtgaaactcactgtttactataaattctgacattttattcgtttgaatatccactccaacgactcgaaagccttctgttagaaattgctttaccgccgcaaagccgattccgctatttgccccagttatcattatattctttttcttcatcattttacattctgccttttttcactttggtaatttgtaataatctgaatattattatttgacaatatattacaaataatttagcattgcactacatcctctattttccacattttctatcatacaggaaattactaaaaaaaacatctactttttaaggagagattcatatggttcaagtttcaaacgtacaaaaagagttgacatccgatatttctaaatatgcttcttttttaaaggaaaacggctattcgtatatcccagcagatttctatcagcagaaaacaacagacgctgcagtccgcgaattacagcttacatatgatgatttgaaagctgattctaaaggaggcggccgttacagagcgcattcccgctacattttggctcctcactccgacactcttgaattagatccggataatggatatttccaatcaaaagaatataattatgatgatggcggtatcgtcagacaattcgaaaaaatatcagatgagtttctacagcatcctgtaacgcggcacatgatacattcaaatgtagaaatggctcgccaaaccgattttgtagattgggagaaagaagtgatcgtcgggcttcaccaagtcagatatcaagtgacacctgacgcgccttcatacagctcacccatttggctgcatcgtgacgatgaaccgcttgttttcgtccatctatttcagctgagcgaagatgctatcggaggagataacttaattgctccgtctgttaagcaaattgataaagtgctgcggctgacagacccgcttgagacacttgctctcgggcaaaaggtctttcatgcggttacaccggtcggcactgccaatagagatggtgcgcatcgagatatattattagttacattttctaacagataaaaaaagcgcccttgggcgctttttttacaaatctatcgaacaattaaaaccgggcatgttgataattgagacactttatggctgacgcttccaagcatcatttctttcaggccgctgatcccccggctgccaactacaatcaggctgacgcctttctcttttgcgtgatttagtatctcatgcgccggctcgccattcgcgtaaatggtttcagcttgaacgcctttttcggctgctttttcttttgcattctcaaggattttcaggccctcttttttaacctcgttcctgatttcatcaataaagtgttcaggcacatagacaattcccgtcagagaagaagtcgtgacgacggcttctctccccacatgaagaatgcttagttccgcttgttgctcttttgccaaatgcactgcggcatcaagcgcttttgcactcatgtctgatccgtcaatcgctactaacattttgttaaacatgctcttcccgcctttcggactgtgggtggttcatctttctcttttattgtccgcctgcatttcgttattgtcaattgaagcgcatgagttttcaaaaaattgtcagagactctctccgtttgtggcgatgacctgctgataccagttgaagctttttttcttgatgcggttaaatgttccatttccttcattgtccctgtccacataaatgaaaccgtagcgttttttcatttccgcagtagatgcgctgacaaggtcaattggcccccatgatgtgtatccgattaattcaacgccgtccgcaatggcttcgcgcgcttcaattaaatgatcacgcagatagttgattctgtaatcgtcctgaatcgtgccgtcctcttcaaccttgtctacagcgccaaggccgttttcaacaatgaacagcggcttctgataacggtcgtataaggtgttgagcgtgatgcgcaagcctttcggatcaatttgccagccccattctgatgatttgaggtaagggtttttgactccgcccagcaggttgccccctgattttgcaagctcttccggatctgtgctcgccgccatcgacatgtagtagctgaatccaatataatccaccgtatgttctttcaagagctcttcatcgccttcaaccatttcaatttcaatattgttttctgccagatagcgtttcatatatcccgggtatacgcctcttgcctgaacatctgagaagaaaagtgttttgcgctcattctccattgccgcgaagacatcctccggcttagaagtcatcggataggttgtcgttgccgctatcatacagccgattttcgaatcaggaatgatgtcgtgacccgctttgacagcaagagcactggccacaaattggtggtgtgccgcctggtacatcgcgtttaatttgttttctccttcttcaaaaacaagaccgcctccggtaaatggcgcatggagcactacgttaatttcattaaacgtcatccaatacttcactttgtgttgatagcgtttgaaaaccgttttggcatagcgttcataaaactctatgactttgcgattcttccagccgccataatttttcactaaaccgagcggcatctcataatgagagatggttacgacaggctcaatatgatgctttaacagctcatcaaacagatcatcataaaatctgaggccttcttcattgggctcctcttcatcgccattcggaaaaattctcgtccacgcaatcgatgtgcggaacgccttaaatcccatttctgcaaataaggcgatatcctctttataacgatgataaaagtcaatcccgttgtgatacagattcaaggaagtcattgattcatcaaatggagacatgatcccgttcggcgatacgtcagctgtcgaaagccccttaccaccctcgttataagcaccctccacttggttggcagcaactgcgccgccccataaaaatccttctggaaatcgtttttcatttgaactcatattgatcaccccattagttttttcaagataaagcaagcagcgcttcttttggctgcactttaccgatctctttcaccggcgaaaacgaatattggtctgtgttggtcacaatcaccggggtaatgacgtcatatcccgcggctttgatttgctccagatcaaaggacacgagcggatctcccggtgcgaccttgtcgccttctttgacgtgagccgtgaaccattgtccctccagcttcaccgtgtccaatccaatgtgtatgagtatttcagctccctgatcactcgtaatgccaattgcgtgttttgttttaaaaatggtggtaacgcttccacgaacaggcgacacaacttctccttcttcaggctcaatggcaaatccttttcccatgatcccggcagaaaatactccatctttgacttcacttaaggctttcacttctcccttaatcgggctgtgaatgatctctctgctgccctcatgcactgccggctgctggctgccgtcagaaggcacatcctcgaatccaagcaaatacgcagctgctgttcccgccgcaaacgcaatcacaaggccgatcatcgcgtaaataaacgttgggccgataaagacagggatgctcgggagacctgcattccctccgacgatataggaagcaacacccgtcatgccgtaaaacgcgccaccggctgcaccgccaatcaaagcggccgcaaacggctttttcaatcgcatattcacgccgtacatcgcaggttctgtgatccccatcagcgccgtgatgcttgtggtaagcgcgagtgatttaaattttttgtttctggagcgaaggaagacggcaaatgatgctcccgcctgccccatattcgccaaaaacatagccggcagtaaataatcgtggccgttttgagcgatgttgttgatcatgatcggcacaaaggcatagtgcatgcccgtcataatgattaaagagaatgtacccgccagcaaaatcattgccacaagccctgcatgatcaaacaaataattgaccccagaagacaagtattctcctaaaatagcgccaagcggaccgactgtaatcaatgtcagcggcacgacaatcaatagcgtgaatgtcggaaccacaatcaatttgagagatgcgtgtgtaaaacggtcaatccatttttccacgtatgaagcaatccaaatcgacagcaaaatcgggatgaccgttgacgaataagtggcagcggttacaggaagcccgataaaggaaatcggtttccccgcaccgagcagggctgtcaaatccggatgcaggatcgccgccgcaatggcagccgctacgtacggattgcttccgaattttctcgccgcactcatcgctagcaggagcggcaggaagtagaacgcaccgtcaccgacagccgtcaaaatgacatgaacctggctcttctccgccatccagccaaacgtaactgccagcgcaacaagccctttgatcatccccgctcccgcaatcgcaggcagaatcggggtaaacacaccagaaatcacatcaaagaccgcactcagcacattctttttctgagaggatgaaccagcgctcttttcatcactgagattgctgtgccgcacaatcgcctgatacaccttcggcacatcgtttccgataatgatttgaaactgctcgccgctgatattggtgcccatcactccaggcagctgctccaactgactgcgatccgccttcgaattgtcatgaagattaaaacgcagcctcgtcatgcagtggatcacgcgctgaacgttgtcttcaccgcctacgagttgtaatatgtccttcgataatttatcataatccatgtgtatacctcctttttatggggggactgctggaagaaaggtggccgcctttcaccagctttttttctatcaaatgctgcatcacctcctaaaagagaataaaaaaaacctaaatgacacagattgcgagagtctcctcctgcacctgcaccatttaggttttgcctgctttcacagtaacaatcctgacgggtcgttttatttgtttgtaggtatactttagcactagatttatcggatgtcaacgctttcatttttgagttttgactaaagggaattacttattgaggactgctttgttatagagggaagccattttgtatattttgttttatttttctgaaaatactatcaaatatatcagctgacttaatataaaagtaaaaaaccttgaaaggcaatttagcccatcaaggtatatgttttatttttgactatcccttttccatatactttctccgtcagttaaaaaaactgcacttggcggatcatcataaagtgaaatttcaactaatgaacctttcttttgtattaaccaattatataaactactttcttcactagtaggatgagctaaaatatcatttacttgaaatgtaactgcataatattcgataaaattcacatcatcgtcatccaacccattgtctgtttcaaagagtgtgtctggttcaccaataatctttaatccactatcccactctattatcaagtcactatctttatactcttttaacgcttttattaaaggatcatattccatgtatatcctcctcaagagaaaagtctctgcaatcatgccgtgagagtcagattctacagaggaaatcgcatgctgtgtttgtttcagtacttttttgtattcgtcgataaacatgccaaagaaaaggagaagggtttatgaattagctttataaaagattatttttattaaaaaaccttgaaaggcatatagccagtcaaggtatgataacaataacattatatttagaagtatcaactacttcacctactgatttatctgagagaatatcataattgttttatatattctttctaataaaataaggctattttaaagtaactccactccaacttgtttgcaaaatttaactttaagtctctcttcttgacccacattcattaccataactttgtcatctttttttatacttgttacattattaaaatcacctgtaaatactatagaatcattaaatgtaatacttagactactcgtttgcttatatacatctaaagttaaaatcaccttgaaattttggtcatctttgtaagtataaattaattctccatcatctatattgcctgttatactcaccggctcactttgaaaaagttctaatagatcatattcatcatactttataaacatttgtattcatccttttattaattatttcggtataactgtgataacatcgcctgcttcatttattattactttgacatccagtgtttcatgaacaaacgttccgcttctattaccaggtatctttttcgtattcattatagcgtcttcaataactgaaggtgaaatatttcttgggtcaacatattttttgataaaatcactaaattcttttgtttgtggtttatatcctaattcttcagcttttttaattgctctacttgttaaagtagcttttacttcaggaatatcaggtgccattctttccaaagcatgctgagaatactttcttccatttatttctcctccgccttttgacatgttccaaccaatttcacccttacccttagaagcaactttattaacctcacccttactttccttctccgcaacatgtttagccacatctgtgacaacacgcttcccgcctcggaccgccaattttttaatagcgccctgaggacttacccactcaataaattcatattgagttccggcaagaaacgaatcaattggcttagctccgcctactttatcctctggtatgtaagacacttcttctagccgctttttccctccagcatagaattctcttacgatctggccgttttcataaacataatatttgccgccgacatagtcgatgcttgcagtattgcgagttagttcgtcaatcacttctatcgtatctatcttttttaatcttttattattatatagtttatcatttatcacccgtatgtctccatagactttcgggtgagctgctgcttctttctgtaatacagttacgttactgtcatcagcatgaatctcacgctcgatcttctgttgtttgccatccttcatcacgatatcaacgttggactgcttatgtttctctattttcttcagcatcatctccatcggtgaatcatccggctgcttcatttgcgagttaatgccgccgaaggtttggttgatgttttcttcttcctgtgatttcaggatagagccgcttttgtagcctgtgatttcaattttcggaccggtatacatggttccgagctggtctatatattttttcatcgtttgaaaatctgattttgcggtttctaatgcttgggtttgctggccgtcaaattgaaagagcttattcagggtgtctgaaatcagccgctcagcctgttctgtttccatccgaaaaaaggaatcattgactgtcggcaggctgacgatgtgatcgatggctgatgtttggcgattgactgcgtcagtgagctgctctgtcacttctcgtgcatgcttgaccccatgtctcgcatcgtgtgagagaaaagcctctgcgatcatgccgtgggagtcagattctacagaggaaatcgcatgctgggtttgtttcagcacttttttgtattcgtcgataaacatgccaaagaaaaggagaaaaggcttgtggcactcctcgtaaaaggtccggatggcatctccgccttttcctttcagcgcatccctcatgcctgccagatgctcaacgcttttttccagcttctccagctgttgtttttgcttgtccagtttctcaatcgtatgctgaatgccctcgtgaagagcgtggacatctaatgttttcaatcccttgtcctcccgcgctttatttcatggaagatgatatgttttcgtccgtttccttcatggcgtttaccgcgctttccgtttgtgcgatatgcttggccagaacagacgcatatgcttcagtgagctctttgatgtccttatttaattgctcgatggacttcacaacattcaaatggtttctgcctgagagatggccgggtaaggaggacttgagttcagctgaattcttgagctgagaaagcccttgcttcactgtgccatacaccattttaatttcctgtgccatttgtgctcacctcactttttatgtttttctttctctatttcatgctctatcctcgtaatttggcgtcttatggaatagacatcgccctctaatgagtggatttttccttctatgctttcgatgattccgttgacttgatcgcttttgatttgctgatatgctttgttcattccttcacgaatatcttcaaaccgctgagcatgtgttcctctccatgcctcccggttaagatgaggccggtgaatgagatgctgggcctcggagaattcgtgtttgatttgcctgatttcgtgcagcactcgttttaattgatggatctgttcctgcttttcatgtaagtcggcttttaccgaatgtaacaacatttcactatgcatgccgcaacacctcgtgtttctatcaaactgtgtcaattctttacaatacagactattttcatattacatgatgggtcatattggataaataggtaaaaaggattgtcttgaggaactttataccggttctaaatagctaaaaattcaatttcataactttgtaagagggagaatcatcatattggggacttttcgtttaggtcttgaaccccgcaatcacttctgttttttctctcgctcaaccatttcttatagtcaataaagctcataaaaaagcgccttctctagaaggcgccttctccatcttatttagatccccatacagcctcaccgttgccattcaaaacactaaacgtcatgacgttcttctctctcaccgaatcccactggcgtaaaaataccccgttatacttcttgccagctaacgtgatgtcgactgtgttttttccggttttctgccatgttccggtcatttccccggaaatggtgtggtttttgttgagctggataatgatggtttgtttgatgtcggctgagatgtcttttccgtgctggataagtttgtatgttcctgtgatgtctttttgttttacttctttcaatgtttcgcccgcataacgatatggtgctgctaccggccagccgtctttgttcatgaacaattggtggactctgacttcgtgttcttcacccctgcccgggaagcgggtgtggaagattaaataggaacgcccggttttttcatcatagtatgcggagttgtggcctggtgagacgtacccggtgcctttttcattttctgtttcaaaagtgtagctgcccatgagtttgacgccgtatggttcgatggaacggtcgtcgaagaatgtgccttctttgccgcggacgtcaagcattggattgccttctgcatcatagtaagggccgtctggtttcttggagcggaccacacggatgttatagccgcctgttgcatcaagaccgccatatgataggtataagtagtagtatttggtgtctggattgtagagaacatacgggccttcgattctgctatggttgccgccgagcagttttttcccgtatccctgtccaggaagcgggaagcccgttttcggattcatttcaagtatgaaaatgccgcctgagtatgatccgtacaccatccacagcttgccgtctttatcaaagaaggtatgcgggtcgacgacattcggatgtttggttgcgtcatacggtgttccatcgttgcttgtgccttccattcctgatttcaaaaagatgcctttgtttttgtatgggccttcgatgttgtcagcaacggcaacacccatggcggatcttggcgaatcgccgcggcaggcgttgtagtacatgtagtatttgccgtccgccagctgcgtgacgtcagccgcccaaagagtatcggattgcgcccattcgaaggtttcttttaattctttatagacattcgggataagtgggttgtcattgcttacgctggtggtcagctgctgccattgcatgaggtcattcgatttagctgaagcgagatgagatccaaaaacataaaaagtgccgtttgtttcaatgatggaagggtcatggacgctgacttctttaaatataggtttttgtgcatagacggagtttgggagggtgaaggccatgataagagctgcaagaaaacatacacagaacaatcggttgaacatctaaacaattcgcctctcttttttattaaattttaaacgcttacatttccctatgaagataccccggcctattaaaacagccgaatgttttcatattcaaacagataggtgatttctcactgttctcttacatagtcagactgatgtctgtctgttttgcgcagaactgctgcttgcatacctctattcatagttcaacccttttgccgtttctccttcttcaattacttctgtttcttcatttgcgtacataatgaacgctttgtccggtcttgtaaagtcgtcgacttttctccggcaacttcgcctctttttggcattttacctctcattgtcagcaatatgacagcggccgcttgcacttctgtctgggtatgcgtgtgcaatgtgctgctttctgcgtcacactattacaatagcaatctaacttgttaaagactgtaaaaaaccttttgacttctgctgctgaaccaattaatataatactcagttaatagttatcagaatttttaggaattgagtgattcatatgacactgcataaagagcgtcggatcggccggctgtctgttctcctgctgctgaatgaggcggaaaaaagtacgcaggttgaggagctggagcgagacggatggaaggtctgtcttggcaaggtaggatcaatggacgcgcataaagtagtagctgcaattgaaaccacttccaaaaagagcggtgtcattcaatctgagggttatcgggagtcacatgcgctttatcatgcgacgatggaggctttgcatggcgtgaccagaggtgaaatgctgctgggatcgctgcttcggacggtgggcttgaggtttgccgttttgaggggaaatccttatgaaagtgaagcggaaggcgattggattgctgtctcgctttacggaacaatcggggcgccgattaaaggtcttgagcacgaaacattcggtgttggaattaatcacatatgaaacagcccatagatcttagacaatagggggctatgcgtgaaaacagatgttcacagcatagctcctttttgtatgggcgctttaccaaagtaaagaaaaaggagttgggcttatggtgactttagacggttcttcattgacaacagccgacgtcgctcgtgtgctgtttgattttgaggaggcagcggcttccgaggaaagtatggagcgcgtgaaaaaaagcagagcggcagtggaacggattgtacgcgacgaaaagacaatctacggcatcaacaccggatttggcaaattcagcgatgtcctgattcagaaagaagactcggcggcgctgcagctgaatttaattctttctcatgcctgcggagtcggcgatccttttcccgagtgtgtgtccagggcaatgctgcttttgcgcgccaatgcgctgttaaaaggcttttccggtgtccgcgctgagctgatcgaacagttgcttgcttttttaaataaacgcgtccatcctgtcatccctcagcaaggatcacttggcgctagcggagatttggcgccgctttcccacctggcgcttgcgctgatcggacaaggagaagtcttttttgagggggaaagaatgccggcaatgacaggcttgaaaaaagcaggtattcaaccggtaacgctgacatccaaggaagggcttgccttgattaacgggactcaggccatgactgcaatgggggtggtcgcctacattgaagctgagaaactagcctatcaaacagaacgcattgccagcttaacgattgaaggtttgcggggaattatcgatgcatttgacgaggatattcactcagcacgcggctatcaggagcagatcgatgtcgcagaacgaattcgcttttatctatctaacagcggcctgacaacctcccagggagaactgagggttcaggatgcctattcattgcgctgtattccgcaagtacacggtgcgacttggcagacactaggctatgtcaaagaaaaattagagattgaaatgaacgcagctacagacaatcccctcattttcaatgacggtgacaaagtgatttccggcggaaactttcacggacagccgatcgcctttgccatggattttctgaaaatcgcaatatcagagcttgcgaatatcgcagagcgccggatcgaacgacttgtgaatccgcagctgaatgacctgccgccgttcctgagccctcatcccggtctgcaatccggtgcaatgatcatgcagtatgccgcggcctcactcgtttctgaaaataaaacactggcccatccggcaagtgtggattccattccgtcatccgccaaccaagaggaccatgtcagcatgggaaccatcgccgctcggcatgcttatcatgtgatcgcaaatacaaggagagtcattgcgatcgaagcgatttgcgcattgcaggctgttgaatacagaggcatagaacatgcagcgtcctatacgaaacagctttttcaagaaatgagaaaagtcgtgccgtccattcagcaggatcgtgttttttcctatgacattgaacgcttgactgactggctgaagaaagaatctttaatacctgaccatcagaataaagaactaagggggatgaacatatgactgatgtaaaaaaatcaatccgtgccaacagaggaacagagcttgaatgcttaggatgggagcaagaggcagtgcttcggatgcttcgaaacaaccttgatccagaagtcgccgagaagccggaggacctcatcgtatatggcgggattggcaaagccgcacgggattgggacgcttttcacgccattgagcattccttgaaaacattaaaaaatgatgaaacattgctcgtgcaatccggaaagcccgttggcatgttccgtacacacccgcaggccccgcgcgtgctcctagcaaattctgttcttgttccgaagtgggcagactgggagcatttccacgaacttgagaaaaaagggttaatgatgtacggacagatgacggctggaagctggatttacattggctcacaaggcatattgcaaggaacctatgaaaccttcgctgagttggcgcgacagcacttcggaggcagcttaaaaggaacgttgacgctgacagcgggtctcggcggaatgggaggcgcacagccgctgtctgtcacgatgaatgaaggcgtcgtcattgctgtcgaggttgacgagaaacgcatcgacaagcggatcgaaacaaaatactgcgatcgaaaaacagcatcgattgaggaagccttagcttgggctgaagaggcaaagctggcaggaaaacctttgtccattgcacttctcggaaacgcagctgagatgcatcacacaattttgaaccgaggcgtcaaaattgatattgtgacagatcagacatctgcccatgaccctttaatcggttatgttcccgagggctattcccttgatgaagctgaccgtttgcgtcaagacaatccagagctttacgtgcgccttgcgaagcaaagcatgaaaaaacatgtcgaagccatgctggcctttcagcaaaagggctctattgtatttgactacggcaacaatatccggcaagtcgcaaaggatgaagggctggagaatgccttcgattttccggggtttgtccctgcctacatccgccctttattctgtgaaggaaaagggccgttccgttgggcggcgctttccggagatccggcagatatttaccgtacggatgcgttattaaaagagctgttcccgacaaataaagcccttcaccgctggattgatatggcacaggaaaaagtcaccttccaaggcttgccgtcccgtatttgctggcttggatatggagaacgaaaaaagatgggcctcgccattaacgagctggttagaagcggggagctaaaagcgcctgtcgttattgggagagatcatttggactgcgggtctgtcgcctctccaaaccgggagacagaagcgatgaaggacggaagtgacgctgttggtgactgggctgtgctaaatgcgcttgtcaacacggcggcgggtgcaagctgggtttctttccaccatggcggcggcgtcggaatgggctattccctgcatgccggcatggttgcagtggccgatggaagtgagctggctgacgagcggctcgcgcgggtcttaacgagcgacccaggaatgggcattatccgtcatgcggatgcgggttatgaacgtgccgttgaagtagcgaaggaacaggacattatcgtgccgatgcaaaaataaaggagtgatgacatgccaaagcaaattgatacgattctcatcaacatcggtcagcttttgacgatggaaagcagcggtccgcgggcaggcaaaagcatgcaggatcttcatgtgatcgaagacgctgttgtcggcatccatgaacagaaaattgtgttcgccggacaaaaaggggctgaagccggttacgaggcagacgaaatcattgactgttcgggacgccttgtaacgcccggcctcgttgatccgcacacccatcttgtatttggcggatctcgtgaaaaggagatgaaccttaagcttcagggcatttcatatttggatattctggcgcagggcggcgggattctgtctacagtcaaggataccagggcggcttcagaagaagagctgctgcaaaaagcccattttcatctgcaaagaatgctgtcctacggctcaaccacagcagaagtgaaaagcggctacggcttggaaaaagagacagagctcaaacagttgcgtgtcgcaaagaaactgcatgaaagccagcctgttgaccttgtttccacatttatgggagcccatgcgattcctcccgaatatcaaaacgatccagatgaatttctggatcaaatgctttcccttttgccggaaatcaaagagcaggagctcaccagctttgctgatatttttacagaaacaggcgtttttacagtcagccaatcccgccgttatttacaaaaagcagctgaggcaggcttcggattaaaaatacacgcagatgaaatcgatccgcttggaggcgctgaattagcaggtgagctaaaggccgtctcagccgaccatttggtaggtgcatcggacgaaggcataaagaaattggctgaggcaggaacgatcgccgtcctcttgccgggcacgacattttatcttggcaaaagcacatacgctagggctagagctatgattgatgaaggtgtatgtgtcagcttggcaacggattttaatcctggcagctcgccgactgaaaatatccagctgattatgtccattgccgcgcttcatctgaaaatgactgcagaagaaatttggcatgcggtcacagtcaatgccgcatacgccatagggaaaggagaggaagccggtcagctcaaagtcggccgctcagctgatctagtcatttggcaagcctcgaactatatgtatattccgtatcactacggggtcaatcatgtacatcaagtcatgaaaaacggaacaattgttgtcaacagggagggagccattcttggataagtacccttttctcagagaggccggatcttcgtttaaagaccgggatgtcacaaaaatgagcgacctgatcgcaacatgggacggccaggacattaagggaccggcgttgataggtgtccccctatcaaaatcctccatcagtcattcaggcgcttcctttgcacccggaacaatacgccaggctctgaaacattcatcagcctattctgctgagcttggagagcatgtcgtatcagagcttctatatgatctgggggatatcgatattcatgtcactgatatcgtaaagtcacatcatcacattttccaaaccatgcacgctctgctttcggaccatcccgattgggtgccgctcatacttgggggagataactctatcagctactccacaataaaagcgatagcacaaacaaaaggaacgacagcagtgattcaatttgatgcccatcacgatgttcgcaatacggaggacggggggccgacaaacggcacccccttccgccgccttttggatgaagagattattaaaggccaacatttgatccagctcggtatcagagaattcagcaacagccaggcctatgaagcatatgcaaaaaaacatagcgtgaacattcacacgatggacatgatccgggaaaaaggactgatcccaacgataaaagagattttgcctgccgttcaagatagaacagatttcatttttatatctgttgacatggatgtcttagaccagtcccatgcacccggctgtccagcgattggcccgggcggcctctatacagaagaattgcttgaagcagtcaagtatatcgcacaacagcccaatgttgccgggattgaaattgttgaagtcgatcctaccctcgattttcgagatatgacaagcagagctgcagctcatgttctgttacacgcattaaaaggaatgaaactctccccattcaagtgatcttctggcaggttgtattttgggtataagaaactcatctgcctaatgaatggcagctaaaaggagggcgagacagtgaatcttcaggagaacagcagccaacagctaaaacgcacaatgaaaagcaggcacctatttatgatctcattgggaggcgtcataggcacaggacttttcctcagtacgggctatacgctacatcaagccggacccggcggtacgatactcgcttatgtaatcggcgggttgatgatgtacctcgtcatgcaatgtctcggcgaattgtcggttgccatgccggtgaccggctcttttcaaaaatatgctacaacatttattggtccatctaccggttttatggtcggcatcatgtactggatcaattgggtggtgacggtaggctctgagtttaccgcatccggtattctcatgcagcgctggttccctgacagcagtgtatggatgtggagtgcgatttttgcagcccttctttttatatgcaacgcattttcagttaagttatttgcggaaactgaattttggttttccagcgtaaagattgtcaccattattttatttatcattctaggaggagccgccatgtttggcctgatctctttaaacggaacggcggatgctcctatgttgtcaaacttcacggaccatggcgggctgtttccgaatggctttcttgccgtttttatcgcgatgatatctgtgagttttgccttttctggtacagagttaatcggcgttacagcaggagaatcagcaaatcctcaaaaggatattccgcgatccatccgtaatgtcgcatggagaaccgtgatttttttcattggcgctgtcttcatattatccggattgatttcgtggaaggacgcaggcgtgattgaaagcccttttgtagccgtatttgcggagatcggaatcccttacgctgctgatattatgaatttcgtgatattaacagccttgctgtctgtcgccaactcaggcttatatgcttcgacccgtatgatgtggtcgttagcaaatgaaaacatgatcagctcccgttttaagaaagtgacctctaaaggcattcctttaaatgccttaatgatcagtatggctgtatcttgtttatctctcgtttccagtatcgtggcccctggaactgtctatgtggtgatggtcgcaattgctggatttgcaggagtcgtggtctggatgagcattgccttgtcccaactcttgtttcgaaagagatttctgaaaaaaggggggaatgtaaaagatctgacatttcgcacgccgctttaccctcttatgcctatagccgctcttttattatgctcagcttcttgtattggtcttgcttttgatcccaatcaaagaatcgcacttttctgtggagttccttgtatcatcctttgctatctgatctaccatttcaaaagaaatgtttcaaaagcgaaaaaaatcagccaagaggaatatccggccgatcacatcctgtaattaaaaaagcacaccccgctcaggatgggatgtgctttattttttattcagtaatcaacgtatgaatcagcttcggcgccttcgcttccgcggcgaggcggatgttgtcatagacttttgcgatgacttcatcgacgttttcgcggttggcgtaaagcgtcacgagcggttcgcctttttctactttgtcgccgacctttttgtggagcatgatgccgacggctaaatcgatctcatcttcttttgtggcgcgaccggcacctaacagcatcgccgcgacgccgatttcgtccgcaacgatttcagagacgacacccgcttctttggcaggcacatcaatttgatatgcggcttgcggaagcttagacggatcgtcaacaattgagctgtcgccgccttggtttttcaggaaatccttgaatttctcaagtgctttgccgtttttcatgacttcttccagcttcgctctcgcttcgtccaatgtatcggcttttttcgcaagcacaaccatctggctgccgagcgttaagacaagctcatgaagatcctcgggtccctcgcctttgagcgtgtcgatcgcttctttgacttcaagcgcatttccgatcgcaaagccgagcggctgggacatgtctgaaatgacagccattgtttgacggccgacgttatttccgatgcgtaccatcgctttggcaagttcagctgcgtcttcttctgttttcatgaaggcgcccgctcccgtttttacgtcaagcacgatggcgtccgccccggcagcgatttttttgctcataatcgagcttgcaatgagcggaatggaattgaccgttcccgttacatcacgaagcgcgtacagttttttatcagccggcgttaaattgccgctttggccgatgaccgcaaccttgtcgcggttcacaagtttaataaattcatccttcgtcagttccacgtggaagccgtcgattgcctctaacttatcaatcgtgccgcccgtatggccgaggccgcggccggacattttggcaaccggtacgtcaagagccgcaacaagcggagcgagaacgagtgttgtcgtgtcgccgacgccgccggtggagtgtttatccactttaattccttcaatggcagaaagatcaatcgtttcaccggagttcaccatagccatcgtcaagtccgcgcgttcacggtcactcatatcctggaagaaaatcgccatagcaagcgcgcttgcctgataatcaggaatgcttccgtctgtatagccgttcacgaaaaattgaatttcttcagtggtgagttcttttccgttttgttttttgatgatgatatctaccattctcatgtttggtcaccgatccttttcgattaagttcagtaaatcaagcccacaattgctgctgataaaaagctgacaagcgtagcaccgtataataatttcaagccgaaacgagcgacgacatttccttgcttttcattcagtccttttacggcaccggcaatgattccgattgaggagaagttcgcaaatgacacaaggaataccgatacgatcgctgttgtacggccgctgaaatggaaaccgttttgcgtaagcgacgtcatggcgacaaattcattcgataccatttttgttgccataatgcttccagcattaacagcttcattccatgggataccgacaagaaaagcgaatggagcaaacacatatccaagaatgccttggaacgaaataccgaatactgcattaaaaatgccattgatcaaggcaataatcgcgacaaatccaatcagcatcgcagcgacgacaaccgctactttgaaaccgtcaaggatgtattctccgagcacttcgaagaaggattgtttttcttcttcctcaacacgaagcatatcctcttcttttgcaacctcgtacggattaataatagaagcaattatgaaaccgccaaataagttcaagaccagcgctgttacaacatattccggtttcagcatggtcatatacgcgccgacaatcgacattgacacagttgacatcgcagatgcgcaaagcgtgtacaagcgctgctgatttaaaagaccgagttctttcttcaaggagataaatacttctgactgccctaaaatcgcagaagccactgcgttatacgattccaatcttcccataccgtttaccttgctgagggcaaggccgatatatctaatgataaacgggaggactttccacttttgcagaatcccgatcagagcggaaataaacacgattggcaagagaacattcataaagaatgtcgtttggtccgcattcaccaagccgccaaacacaaagttaattccctcagccgcgtattcaagcagataaccgaatccttttgcaaatcctcccacgagaaaattccctatcccggtattgaggagaatgtagccaagaataaattgcaaaatgagcataacaacaattgggcggatcttaattctttttttgccgctgctcgcgatccacgcgaggcctaaaaacacgattaaaccgataatcccaatcaaatacttcatatgtgtttctcctttatttgtattcgcttacaatcactgtttcctcagaaaacggaaagcagtctgccttccgtcagctcttaatagttgtctccgcctgatgcattttctccttttacgatagaaacgcctgcgctggcgccaattcggcttgctccggcctctaccattgtgtctacatcttctttcgttctgacgccgccagatgctttcacgccgatatcaggtcctactgttttgcgcattaaggcgatatcttccttcgttgcgccgcctgtagaaaagcctgttgatgtttttacgaaatccgctcccgcagacaccgctaaacggcatgcacgttctttttcttcatcagtcagaaggcacgtttcgataatgactttgacaagcgcttttccggctgcagcttccactacaccgcggatatcagcttccaccacatcgtcttccttgtcttttaaagcggcaatattaatgaccatatccacttcagtggcgccttttgaaatggcgtcttttgtttcgaatgcttttgtttcagttgtattggcaccgagcgggaagccgatgaccgtacaaacgtcgactccagttcccttaagctcttttgcagcaagctccacccatgtcggattgacacatactgaagcaaatttgtatgttttcgcttcttcaattagttttagaatgtccgctttttgtgtatgcggtttcaaagctgtatgatcaattatgttggctaatgacatccttcgcacacttccttttttgttaagatattttttagcataaccgacttttgaacatatgtaaattggtaattgaaattttgttcaacgaaaggtttgaacgtgtcacaaatcattaacaagcgccctcgcggtatgctggtcaatgattaaaacgttggcatattttccggttaatgctccgtgaatggaagatacttttctgcttccgccggcaactaaaatggagcgttccttcagcctgaggtcttcaagctcaacaccgatggtccggtcattgatggcgctgctgcaaatattccctttcgcatcaaaaaagcgtgaacaaatatcccccacggcctgttttttcagcagggctttctcttcttcgttaaaatatccgagtcggaacaacagcgcttcatcacggacagtccccaccgtgaagagagcaatattcgcctgctttcccatctcgatgatccgctcaatatgacggtctttctccaccattcgcttcacatccgcattatcaaacacgacgggaagcggaagatagcgcggcatcgtttgaaaagcctctgcaaacagctgaatcgtttcagccgaatacgtgtttacccgggaatggctgatgccgccttttagctggacgacctcgacgccttttacctgcttcggttgcatgttttgcgcgatttgatacatggtggttccccagctgacgccgacaatgtcgccgtcttttaccgtttcatgcatatattctgcaccatagcggcttaggtcatgtgtaattcctgcataatcgggtgtcggggaaaacacaacatgcgcctcaaggagcccgtatttctcttcaagtatggaaccgagcgcatccaaatcctcaaaagggtccatgacgcgaatctggacataccctttttcctttgcatattgcagcagccgggaaacggttggccttgaaatgttgagctgctcagcaatttgctgctgactgtagtcagactgatagtaaagccttgccgcttctatgcttaattgttgtttttcccgatccattccgcacctccctgtggatcagtcctgataaaactgcttttgatttgcttttattatacaggctggcgccggctttcatccacctgatttctaagaaactgaaaaacgctctgggcgcggacctgcccagagcttacttctcccaagtcatatgctgataaatgcctttcataatggcgtacattccatataggatcaggcctaatgccaatatagacagaatcaatttgccatgcggctgctgcgcgagttcggcgagcgcgccgtcaaagcctcttgtgtcgtcgggatcagcggtcatggctgtcttgatgagaaaatagccgatggctgagaaaataatggcgcgggcgatattgcctgcgcgcccggtgtttttcgtgatgcatatcatctgtttgttcatttttgatgtatcgaattctttcataaaagcagcccgaacgcctttcataaattgaacaatcgcaaatacgataaaacccgcacccgtaagccctgtgagccatcggccgaatggctgcgccaatacataagcggaccacgtctgttctgaagtgccgccgtccccttggccaaacacaaatcgcaaggcattccaagcgatggatgtgtaaacggcggcactgaaaaagtttcctattctccgtgacaggcctcgcctgctatttccgtgcccctccgtgtccttgatcgcacttaacaccatccagattacatagccgataaggccgatgcctattaaaaaaagcaatagtgacccatacggcatgcgtgatagcgtttggagagctccgctcgaatctttggcgcggcctgccccggcagccgtcataaaagccaaaaccccaagcagaataaaaacgccgccgaatgcaaaataaccaagcctcccgaatcgtttgatccaaggcttggtttcctgttttatttttgacatgtaccggtctttcaccgccatgtgtccaaccctctttcacagaaatctttactgtaacattcccgattggacaaagttgaaacagcttctgcctcagctatggctggctgagatatgtttttgctgtttagctgattgtgcaggtgtcatccaagcagccgctgcggcagctgtgactccgcctgctaatttcccaatgatcatggccgccgccatttcttttttcattccagccacaaaaccgaggtggctgccgagtacaaaagcgccgctgaccgcaaacgcgacattgatgacctttcctctcggcgtcatatcctttaatgaagccagcattgggatatggtgcgccaaagaggtcaccaagcctgcagttgctgtctcatctaaatgaaggcatttccccagagcctgtagcggttttttaaaggtttttgtaataaaagccgtcattggaaacgcccctgccaaggcaatggcgatggtccctgttgtttgtatccctgtctcgacattctccattcccggaatcagcacaataccggtcatcgtttcaacggagacagctgcaagcccgataatcgcaaccacactgaccgctttcccgaagagatgaaacaactgaatcatactgtcggtgtatcgccataacccaaaagcgatcacagcagataacagactcgggatcagaaggtttttacctatcatgccgatgtcaaagcctgcgcataatccgccgattaagcaaccgatcggcactgtgcacagcccgattaatatgcctttcgcaaaatacggatgatcctctttttcgatgatgccaagagcgacgggaatcgtgaagacgattgccggtcccatcattgttcctaaaaacacccatgaaaacagcccggcctgcggatctttcgccatttctccagccagcgcatatcctcccatatcaatcgccaaaatggtgttcgcaaaggaagaagggtccgcgccaatcgctgtgtaaaacggagcaacaatgggaatcaggattgctgccagcacgggcgccagcgacacaattccgatcatggacagcgccagcggccccatagccttaaagccgtccgcaaaccgctcgcctagcccccatctgtttcccaaacaataatccgccgctccccatagtaaaaaggcagccaaaatgaatacaaccgtgtcattcaccgtcatggttttctcctttttcaaacgtatgattggttttatcatatcatctgaaatcaccgaatagagttgatcttattcaatatgagctaaaaattcttttatatcggctttttcaacggctgttatgatgctccgcgctttttcttgcgggaccgttaatgtcaatttttctattatgtcttcttcagacagctcatttcctggcgccccttttgggcagtccacacgcgcttcgcaaatccggccgtctgataaataggcccggacaatcgtgaaacggccttttggaacggcatgaggagccggctgaatagcattgtcatatacgcgctgaattcgccccattgtcgtttgaaccccgcttgggatcggctggctgctgaaatgttcaacggtcaggccgtgtccatgcaaagcaagagcaatcacatattcaacgctgaaacggccttcctctccagtttttggagatctttccgtcaatgcagcatctccgcctggcggaaatatcacttcaatacgttcggtattggcagcagaaatggtttcttcggagataagctgtcgtaccgcatctgcagcatggtgtgccgcggaacaaaatggatagattttaaaccatagacccggctgcacaattctccacggtgccccccaatcgtttagcaaagtgtgttgtgctttctcaacgtcaccgtacagactgaagaaaccagtttctccatcaaatgccgtgcgggacccgccaaattctgattgggccagcttaacggccagcaagccagcctgagccgccaaaccggcgtgcagcggtttcatttctgttccaaattgcaccctcatcccagcagattgcgtagccgcaaaaccaattgctttttccagctcttcctgagtcagctcctcagcataacctacggcgcaggcagcagcgatggcaccaagcgttcctgtattatgccagcccttttcatagtggcggctgccaattgattctcccagccgtgccatcacttcaacaccaacaatataagcgccaagaagccgctcgtcatgtccgcgagcggcagatgcaataagggccggtacgatgactgcactggggtgtcctcttacatcggagtggacatcatcaaaatccaatgcatgggcgataaatccattgagcatcgcggattgtaatggcgcggcctttttgccctgtccgataataggaacaaggggcaggcctccttcatcctctatcagacggaggagcttttgaattcctttatcttctcttcctgcgaatgaagcggcagtaaaatcaagtaatcccttttttgcttcgtgaatcgcgtcaactgaatgctcaggttgtgacgttctcacagcctctgcaagacctgctgtcagcccttgtttgctcatttgatggtctccaatacaataaccgccagctccgcaaagtattgagaggcaaccgtaagggcttcttcatccagtgtaaaggccggatgatgccactcctccgtcccgttcgttcccatccagacaaaaaatcccggaatcttctcttgatacagagcgaagtcttctccgcccggagactgctcagcgtgaacggtttgatagccaagccgtgccgcagcttcggatgccgcattcaaaaatgtgccgtcattctgaacggaaggcaaataaggaaaccacttgaattctgcttgtgccccatagcccgctgcaattcctttagccactcgtctcatatgctcgggaacagcctgcctcgcttctttttgaaaggttcgaaccgtcccttccatttcagcttggtctggaatcacgttccacgacgtgcccgcctgtactcttgtgatactgacgactgcgttttgcagtgagctgatattgcggctgaccacagattgcagcccgctgatgatttgtccggctgcagcgattggatcaatactgttatttgggatgccggcgtgtccgcctttccctttgatgacgatctcaaaccggtcaacacttgccataagcggaccttcctttacaccaatggttccgacaggcagatccggcttattgtgcatgccgaaaatcgcggaaatgccatcaagtacaccagcttctatgacctttcttgctcctgcggcaatttcttcggccggctgaaagataaagcggactgtacctttcagctcggcctttctttgattcagcaacatcgctgtgccaataatagaagcagtatgaaaatcgtgtccacatgcatgcattgtgccatcaaccttagatgcaaatgggagattcgtctgttcttggatcgggagcgcgtcaatgtccgctcgtattgctatcacggggccgtcttcccgtcctttgatttctgcaatcacaccagtctccaattgaggaacatcaagtatttcgatttgctcctcctcaagccagcggcggatttttttcgtcgtttcaatctcttgaaatgacagttcaggatgttcatgaagatcacgccgcatattgattaaacgggtatgaaacgttttgtcggccattgttcttctctccttcttatataagctctgcaggctctcccacctgcttgataaatcgtttcgtccgttcgtttttcggatggtcaaacaattcctctggcgttccctgctcgataatatggccgtctgccataaaaatcactttatcagcaacctcttttgcaaacgccatttcgtgtgtaacaatgatcatcgttgtttgtttttccgcaatggacttgatgacctgaagcacccctgtgacgagctcagggtcaagcgctgacgttggttcatccagcaaaatcgcatgcggattgaccgcaagcgcccgcgcgatgccgattcgctgctgctggccgccggacattgtgatcggatagctatcagccttatgctccagaccgacttgtttcagaatctccattccaatacgtttcgcttcgtcgcgtggtttatgttgagccacgattaaagcttctgtaatgttttgcagagccgttttatttttaaacagattgtagttttgaaagaccatggccgtttgctggcgaagccgatatgcttccttgcgtgtaaacttttccgcgttcagtttggcttctccgatttcaataagtccttgatccggacgctctaataaatttaagcaccggagaagcgttgactttccggaaccggacggaccgatgattgccaccacttctccgcgtttcacttctagatcgattccgtcgagcacgacgagatctttaaacgctttgcgaatattttttactgttatcaactgatttcacctctaagtccggtatggcttgctcatggcacgttcaaacaagtcctgcaacatgctgtagatcatggtaagaacccaatagacgatcgcaaccgccaagtacgtctcaaaatatttgaggtttcctgaagcgtacatcttcccttgggcgaacatctccatgacccctaatgtaaaggccagtgacgtttctttcaggagcccgataaatgtattgcccgttgccggaatcgcatttcggatcgcttgcggcaaaataatccgtctgtatgcctgaaattttgtcataccgacagacaggcacgcctccagttgcccgtcatcaacagaattgagggcagcccggaagatttctgccaaatatgctgcattttttaagcttaacccgatgatagcggctgtgagagctgtcattttgctcatctctggaaatagctgcggcagcccgtaatagattaagaacagctgcaccagtgtcggtacgcctcggaaaaaggatatatacagctttgacagctgatgaagcactggaattttgttctttgtaatgagtgcgagaataagtcctccgataatggcaaaaatcatagctgctatggccataaacaacgtgatcggaagggcctgaattaaagtcgggaacgctgatatcatgaattcccaatcaatcgtgttcattctggtgagtcaccgccgtttcttaatgcttctgttctactgtgatatcttcattaaagtatttttcagagagttttttcagtgttccgtctttacgcaattcatctagcgccttattgacttttttgcggagcttgtcgtgcgcatcgtccttggcaaatgggaatgcaacctgttcgtaaacaatcggatctcctgcaagctttaatggcaaaccggtcttcttgatttgcgcgatcaatacagttcggctgttgacataagcgtctacacggccgtacgcaacatccttcagcgtaccctcttgtgtttcgtacgttttgatattgatttttttatcaggatctttgctttcaaggtttttcgcgtggtttgaaccgagaacggctgcgactgtcttgccttttaaatcgtctactgatttgatgtctgtattgtcttttttgacgacaatctgtgttcccgcataagcgtatggtttcgtaaagttatacgtttccttacgttcgtctgtcacagctacctggttagaaatggtgtcaagcttgcctgtttgaagctcccccatcagcccgctgaattcaagcagcttccagtccagtttcatgtcaattttcttagcgaccgcttccatcacttccacgtcaaaacctgtcagctttccgttttctttataagcaaatgggtaactttgtcctgtcgcaccgacatgaagcacattgtcatcctctttactgctgctgtttccattgccgcaagctgagagcaccgctaataatgcagcaacgaccagcacaatccattttttcattttcatttgattttcccgccttttctttttttatagatcatgtcgcaattgttttttcatatagactgtgatatgcccttttccaaggtcttgttcacctgagcggacatacccttttcgttcgtacatctctatcagccacggatgcttatccgctgttccgagtgagacaaacggaacctttaacgtatcgcgaaggattgtttcctccagccattgaagcagctttgttccgattccttttttaccggtgtcggggtccacagcgaaccaccagatatgcggaacgccatacggtcccggctgttttccccaaggcattctcaaggtgatggtcgcgatgatccgcccgtcttcttccatgacgtagcaagcgtttttccgaatattttgcagcaccaaatctaaatccgcatgagcagcagcaaaacgaatgccaagctttcgaatcggttcataagcccgcaatgtcagcgcgaggagctgttcagcatcacgttcaactgcaaggcgatattgtggcttcatctagcgttcctccttactttgcatagcggtttaccggcttttccaaaccgaagtgctctcgtaatgttgtgccttcatattcttttctgaacacgccgcgctcctgtaaaatcggaactacttgatcaacaaacacttcaattccttctggaagaagcggaggcatgatgttaaacccgtcacacgctttcttatccacccattcctgcatcttgtcggcgagctgctccggcgtgccgacgaagatatggtggcctctggagcctgcaacgtatttgtaaagctctcgtatcgtcatattgtccctttcagccatttcctgaacaagcttgaagcggctcttcaccgcattagaagcttctgcgtcaagcttcggcagcggcccatcaagcggatatgccgacaaatcaattccgcctaagtaattttggagaatttgcagaccgacagatgggataatcagatcttgaagctccttgtatttggcttgcgctgcttcttctgtatcggcaatgattgggaaaatacccggcatgatggcaattttttctggatcacgtccgaattccgctgcctgttctttaatggattgataaaattcctgagctgattccaggtggttttgtgctgtgaagatcacttctgctgttctggcagccaacgcttttccgtctcctgatgatcctgcctggataatgaccggctggccctgcggcgttcttgaaacgttcagaggtccgcgaaccgagaaatattctcctttgtggttcagctcgtgcattttttctttgtcaaagaattcacccgtttctttattacggataaaggcgtcctcttcccatgaatcccaaagcccctttacaacttcgacaaattcctctgcccgctgataacgcaaatggtgttcaaggtgcttttcaccgctgaaattcagcgctgttgattcaatagatgaagtgacgacgttccatccggcacggccgttggacagatgatccaatgacgcaaactgtctggcaatatggaatggctcgctgtatgtagtggaggctgttgctgtcagtccgatttttgatgtgacctgcgccaaagcagagagcagggtgaatggctcaaaccttgttaatacatttggatgtgatttgctgtcaattgaaaggctgtccgctaaaaacagcatatccagcttgccccgctccgctgttttcgcaagctctttaaaataatccaaattcatgctcgcatctgagggcgcgtccgggtgccgccaagacgcaacatgatgacctgtacctgctaaaaatacccctaatttgatttgtttctttttgcttgtcatgacgatactccttttatcatgtttttaggctgaataatccgaaaaataaactcctatattcctagtcgtttaatatgaataaatcaaaatgtacctttgtcttggacgtttgtcaatgagttaagattaattttttctattcaagcgaaaagacccttgcgtgaccatgagggaacggcattgattcattcaactagtgcaacctctatatcggcaagaaaactgagtctaatgaagcaaagactcagttttcacccaagaattttatataagatttcgccatttcctttgccttttcttcgcttttgcaaaccgcctatccattcagacgccgtaacgattgtataaaaaaacagctgactccagatattcaaacgggaatcagctgattgatgtgaattaattaagctcatgaatactttcttctgctttagcagaaaactctttaggctcaaggcggtctaggtcttcatgaaataaactcactttttggatttgccgattgtcatagtggtggaaatagtagtttccagtttcgttgcacatcacggaagtatattgcgtataatgaatttcgtcttcttccgttatcactgcgccctttggtatcgtcatatttgccaaaatttgaaaagcggctgttacacctttcgtttcatcggccgccggctctagatgttctttcaaataaacagctctgacaaaccgggaaggcggtgtataatcccccggcagaccaacagttcctaagccttggccaaaagcagaaagggctaatccgcccatctctttgctctctaattgcttcggtctgattcctgtatattgctgcagattggttacatgccatataaagtcggggctgttcgtcatgacaccaggttgattatcatagactttgaggccgtctgctcttggttctatcgtcaggcttcggcccgtccggtctgacaatatccagtgaagcggtaaaactgtatccaatagatctaattttttctctacaatcgttaaagatcgaatcttttcttttacgtcttccaaagactgacagactgacagcacccatgtcacaaactcatgcgggacaatgtgaacggtatcttcccgtatcgttttttcgtactccgcatagcccggaaaataaagcgccgcacaagataaaccgctttcattaacgccgtcggcaaataatatatttccaagttttctccccataccgataaacgcgtactgtgtctgatgggcctttccgtcagcttcactcttccagctgtaacggcgcggatagagaatgacctccgtccccagctgaaatgcaaaatccattgttctcgctaataaatgattccggtcagcagtttccaatgtaagacttgtgcacatttgatcagtccccttttcaattcagattaatatcatacatattgtgaacgaattggttttatcagcataacgaaagtcaaatcgattcgtcaaagaattgacattacatcaaataaaacgaaaaaatccagccttctaagaggctggattttttattatttagccaaaacaagctcgtgaatcgcatgtgcaacgccatgttcattattggagcgcgtttgaaagtttgcggcttccaatacttctgggatggcgtttgccatggcaaccccgcagcccgcccattcgatcattgtcaggtcgttcccgttgtcgcctatgcacatgacttccgcctgttcaattccaagcagctgtgccagctggcgtacagcatttcctttgctggcttccgagtgcagaatttcataaaagaaaggcgcacttctgaccattgtatatttttctctcacttctttcggaatcgatgtaatgacgcggcttaagttctccggtttatcaataaacatcactttcgggatgaggatatcttttggcacctcgtcaattttgcggaaatgaagcggcacctgtgtcacataggattcgtatacggtaaattcgctaatgtcccggttaggcgtatacaaattagatgagtcaaagaaatgcatcggcgtcttcagctctaagctcaggtcatataatgaagccaaatcatcataaccgagagacagctctgagaccacttcatttgtatgcgtattttgaacaagtgctccattatacgcaataacatagtcgccttcttcaattaaattcagttcatctaaatatctctgcacacccccgataggccggccggtgcaaagcacaattttgacaccttccgcttttgccgcgtgaagggcgtcgcggacctcctctgttacttcatgatgatcatttaaaagtgttccatccatatcaattgcaattagtttgtacatcctgcatctccttcatgtcgttttcaggctatagtcccatcatatcgttttttctttttgatattcaaccggaagagatggttttctccggattctgtttagacgccgcccttgtcttcggatacgcaagcgcggtttccgctttctttctgccttgacgccgttttctgcttttttctgtttcatcagcagaaagccggcagctagaaaaggaatgccggttatattcaagatggcaagcttcacacccgccgcgatgaaaaagaacccccatgaagatgatggattccgtctgatcatgacgtaagccgccatttccagaacgatcaggatggcatgaagcactatgccataaatcagcaatacaagggcaaaaaacaaaacataattcacgattgcccctgagtacatcatagcgcgcatcatttgtataaacgataaggactgcatggagccgctgatgacattagggttatagatcgtatagtcactaaataaatgtttgactttgagaaaagcccataatataaatatccattgaatgatatgtaaaacaagccccgctgccaccagtctttcagctttttgatttctcatctttctcctccctgccggtctttgattcgattcttgtcatcgtttttctctgtccattttgctcccatatcaatgtcccgttttctcctcttttcagcgtgcttttgagcggataataggggccgaggtactgaatctcgatagacccgtcagtgctttgggaaatcaccttgtatgccataaaaggcagctgtacctctcctcttccttcaatcacttccgtttccacaacctcgtcttcggtaaatgtgactgttgctgatttcacaccgtccgttggcccgggggcacgcccctcatcccacgttccgtaataaaacggcgtctcttctttttgctgctggcagcccgataccatgatgcatacagcaattaaaaacaaaatgccatatttgtttctcaaggggatcaccattctttcctccttttttgggcgaatgccgtgccactgtgccaatgactacataagttataaggaattcacccacaaggagactgatcacatgaacccttatcaatattacagccctcagctgcctcagcaggaaccttactatagccactatgagtacaatccttatccgcagcaggatgtatacgatccataccaaatggacagacagccggcattggaaagaagaatcgcagcacttgaacggcaaaatgaacagcagtcaagagaattaacccgtctgacaaacgaagaccgccgtcaaaatcgggaaattgcacggattgccgaacaggtcaatcagttaagccaggctgttgaacgccatacacgccgcctaaatcggctcaatcagcgcctccgtacagtagaaaaccggctgaatatcccatttactgcaggggaaggcggtttctgagcgaaacaaagaaaaaaagcggaatacgattctcccatctcagggtttcgttttccgcatttcttatatgttaaaacggaacatttacataaaaagggtttgtacccagtatacaatctttaccgttttcattcaaagatagaggggctgaggaaaataattgtagttcctctttgacggaatttcttttcattcaagttgcatgataataccgactcacgtcaatcgatacatggagggatcattcatgcataatacacaacacggcttgcagcagctgaaccaatgccgccaaactgctcagcagctcattcagcaaacacagcaaagcagccagcaatatcgccaaatgcttcatcaggaacagcaaaacatccaaatgctgcagcagattctaaaccacgaacaacaagctgcacataccattcagcaagcactgcacgggcatgatatggcgattcaaaagtgccagcaggttgtcaacatgtgcaaccaaatgcaacaggaacttactggacaatccagcgtcatgaatacgaatgtgtctacacttccattcggccaaaacacgccatttcagcagcaatcctatcagcagtaacatataaaaagctcaacacaatgcgagtgttgagctttttttcttactgttctttgcgaatatgtatatcctgaatagactgtttcggtgcatgaaatctgctctcggcttcacttcttgcctcggcaaaagcccgcgcctccacatgatctttgtagacatccagctgaatcaaatacagcgggcgcactttaaatccatgaataatggtcaccgcccataacgggaccacaataaaaacaccgggcagatcgggcaaaacaaaaccaaacgcaaaaatgaaaaaataaatgatgccgtacatgatccactttctatttctaaccttgatgccaataaataaaaaggcaaaaaaactggtaatggcaaaaggcatgaaaataaacagcatccaccagctatgcagccattcccaagcggaacctctttttgtaattcccatatttttctcctcctatttacctataataatcgattaggcataccgcgtcacccataaacgggaaaaactttctcccttaaaaatagtgatagacggggaacaggtttcttgctatattattaattgataatgataatcattactaatctattgagatacatagtgggagggttcttgatgaaaaagaacatattgctcgtgggcatgcttgtgctgcttctcatgtttgtcagcgcttgcagcggcacggcttctaaagggagctcaagcgattctgcttccgaaaaaacagaagtgagaacatacaaatcaccaaaagggaacgtcaacattcctgcacatccgaaacgcatcgtcactgatttttatgccggtgaattgctgtctgtcggggccaatgtggtcggctcaggctcatggtcatttgataatccgtttttaaaatcaaagctgaaaaatgtgaaggatgttggtgatccaataagcgttgaaaaagtgatggagcttcagcctgacttaattgttgtcatgaatgaagagaatgttgataaattaaagaaaatcgctccgactgttgtcataccttataacacagcgaaaaacgtagaagatacagtcagcatgttcggagatatcgccggatcgaaagacaaagcaaaatcctttatggctgactttaacaaaaaagcggaagcagctaaaaagaaaattgccggcgtcattgacaaagatgcgaccttcggcatttatgaaaacacagacaagggcgaattctgggtgttcaatgacaatggcggacgcggcggccaagctgtatacaatgcacttgggttaaaagcgcctgaaaaaattgagcaagatgtcatcaaaaatggagagatgaaacagctctctcaagaggttattcctgagtatgccgcagattatatgttcattacggattacaacccgaaaggcgaaagcaaaacactcgacaagctggagaattcctctatttggaaaaaccttgatgctgttaaacataatcgcgtgtttatcaatgactttgacacgttctacccgtacgacccgatttctgtcagcaaacaggtggatatcatcaccgacatgctgatcaaacgggccgaagaaaataaaaaataaaaaaacggcacagtcatgacgctgtgccgttttttatgattcactttaattttgattgtacggagtccggcatatcttcaaacttgacttcttcccaagtctcgacatactttcctttcgccttcaccttcaaatacgcgttcttccgaagctctttgccggcgaaaaaggtcacttcttctttttttccggatgcattatatccgtctaatgtatattcagtaccgcccggactaagatgtctgccatctcgatcaatctgaacatagacatcttgctggtgaataaacggattaaatctgtctgtaacatcgttatgaaaaaagagaagcccgcatattacggcagcagccgccaagacggccaggattgccattgcttttttcatctttgcactccccttacttgttcatttttttcaaatagcttgaccgcaccgcgaggaagaatagaagctgaaaaatgaaaaaccctccgatggtgagactgagcggccccgcgacatcagaatagccttccacagccaatgttctcaaggcaaacagtgtatgcatgacggcaatgacaaatggaaagaagaaaagaatggccaattgtattgtcacgctttgtgccatttctcgctcactcagaccgattttggccagtgaacggtagcgctcccggtcttcatctaaatcagtgaacagcctgaaatataagaaacttgctgccgcgacaaagaatacaattgcgataaacaggccgataaataaactcaggctcggcagctgcaccgtatcatagtaagtcccggcttttgaagcaaaatcagaatgcacgtcgatataattgccgtaaatctcattttgcaaggattggctgatctcaagactgtctttccaatgatcatagctgtagccgtataatgacgcttgatcaccgagtgatttcagctgatcaaaggtttgatcattcaccgcgatgatagcattcaatgagatcagcggttttttgacttcttttaccgacagtttttgatcagacagctcccctttttggttcagcagcttcagctgatccggcgcttcgtttttgaaattgcggtcatacgttcccgggaaatagacagcctcgtcttctttcaggccgttcactttgacatggaagtattttgccgcatccgattcactgatcatgtaaacagggggaacagtttctccttcctgatagcgaacataggaaacatctattttgtctttcttatacgtaaagccgtgtgttttcagttcatggtcaatatctttcaaatgagtctgttcttttggattgttgctgtaagataaatactccatttcataagcggactcttccgctccgacggtcgatttgtacattgcgagcacgcctgtcgcagtaaacgcaaccgcggaaataatgctgacaataaagaacaggcgggcgttgtcttttagacgatagacaaggtcagaaacccaaatgatgtttttcccgcgcagataaaaggttttccacttcttcagcgcgcgcagaatccatatgctgctttggctgaaaaagaaatatgttccgataacggtgagcagtaaaatgataaacggttcggccccgtggacattgcctttaagaaccatgccgtacccgccgcacagacaggcgatgccgaataaggacagaagcacggacggcttaggctccggtttaaccttgccagtgccctttattaatttgataaccgtatttgatctgacaaaaaggatcgtaaactgcgataaaaagaaaaataagagcagaaatccgcaggccgtaataccgagcgctttccaaggcatatacaaaggcagcgcgtccatttctaaaatataagcgccgaccgtaaagaacgtctttgaaaaaatgaatccaccgattatgccggctgcaattgacatgacgccgatgatcatattttccgcagtaatgagctttctcagctgccccggcgtgatgccctgcatgagcagaatgccgaattctttatttctcgatttcaaaaatgcattaaccgaatacagaacaaataagaaagaaaaaacaaagatcatccattccgcggcggttaagccttttttggcgatgttattcaggtagccttcctttaatgccggatgaaacaggaacatcgcaaaggtaaagaaaatcaaaacggaaaaggcgctgcttaaaaagaatgcaagataagcccttttgtttctcgtgacgtttttataagcgaactgaagaaaggtcatttgcgtttccccccagcatagacagcacatcaagaatttgttcataaaagacttggcggttttccccgcggtaaatctcattaaacaattcgccgtcttttataaagatgacgcggcggcagtagcttgccgaaaccggatcgtgggtcaccatcaaagccgtgacatgatcatcccgattcaggctctgcaacgtttccatgacgtcttttgtcgctttggaatcaaggtttccagttggttcatcggccagaatgagtgacggcttatgaatgaccgctcttgcgatggcggcccgctggcgctggcctccggatacttcaaacgtccgcttgttaagcaggttttcgataccgagctttgccgcgatgccgtgcagtttttcttccatgacagacggcgcttctttttcaagcgttaacggcagcatgatattttcaccgatcgtcagcgtgtctagaaggttgaaatcctgaaacacaaatccgagctgcttgcggcggaaatgagcgagctttgtccgcttcaggcgatgcgggttttctccgttaatcaggatatcgcctgaatctggacggtcaatcgttgaaatgatattcaaaagcgttgtttttccggacccggacggccccatcaccgccgtgaactcgccttcttctattgaaaatgaaatttgctttaaggcctgataggacacttgtcctttataggttttatttatatgtttgacttcaagcatattcgccatgaaaatcctccttatggttttattcttgttgatctgggctgctttcatgtagtgccgggacgttcaacataaaaatccccttgacataaatccatgttatcaaggggaaacaaagcgggctatgttgttttcttaacgcagccttacatttttgtaagaaatgaaaatcgaactgatgtcccttcaccgggagacgagctgatgtccaccgtatgattgagcttatctgtaatttctttgacgagatggaggccgattcccgtagattcttggaaacgccgcccgttttcacccgtgtaataagggtcaaacacccgcttgatgtcttgtgagggaatcccgacaccgtaatctttgacttcaagcaccgtcctgtcttcatcgcggaagacattcagctcaagtctgtcactcttgcccgctgaatacttgaccgcatttgtgaccacttggccgatcgcaaatttgagccatttggcatcggtgtaaatctgatgatcatcgcaaacgttcattttcggataaacgcgatattgaataaaaaatcgtttatagctttgaatgactgattggagaagctcggacagggaaaccgcttcgattttaaaatcccgttcaaacaggtcgagccttgaagaataaagaagcgtctccagcccgaattcaatctgccggacttcttttttgatttgttcaaaaacgggctcatcctcttcttgaatgattaaattaatgaccgacagcggcgtcttcacttggtgcacccattgattcatatacgtcacccgcgcgtcaagcttggcttcggtctcatggagcttctggtgctgcagccggatcagctccatctgcttttcatacagctctgaacagaacactgaagaaccgagatacgggatatccgtcccttcctgccccgagctgagccaatgatacacgccgcggtctttgtaccagcgataggcaagatagcccgccaaaataagaagctgcacgcccaatatgtaaaacaagtgagaaaaagaatgcagacccgcaaaccagtaataaaagaagacaaacagcccttgaaggagaaaaagcagaatcagcactgcatgagaccggagaaacagcttcatgactgcgccctcagctggtagccttcgccccgcaccgcttcaatagaaacaggcgcattcagctcccgcagtttttttctgagccgcgtgatatacacgttaagtgtattatcatcgatgaatatgtcggtgtcccacgtcttttccatgagacggtcccgactcgtcaccttttctccccgctcaagcagcacttccaaaagcttgctttcttttttagaaagctcgcttttttcatcctgaaaacgcagttcaaaccgttccacaaagagctgaacgccggcatattcaaccactttctctccctgctttgcggcgtactccccgtacgccctccggatctggcttttgattttcgcaagcacaatatcataagaaaacggtttttcgatataatcgtctcccccattttcaatcgccatcacctgatccatttccccgcttctggcagaaataaagatgatcgggcttgtggagtgctggcggatctgccggcaccaataatatccgtcatatgccggcaaattgatatcaagcagcaccacatcgggcttttcccgcaaaaagacatcaagaacagctgtaaaatccgcggcgaccactgtttgatatccgtatttttcaaggtaattctgcaatagtccgcgaatgtcttcactgtcttccacaatcataattttattcaaactgaaccactcccgtttcttacactgctgccatcatcataatcgttttgggcgtatggacgcaacaccgcacaaaaaaaccgccatctcggcggtttctgatctctttagccgacctgctgcttagctgctttaccggctgatccgaactctctcattttgcttcgcactgtctcttccacggcttcaatgccgggtgtcaaatagccgcgcggttcgtacagatcgctgttttcctgaaacatgcggcgtgtttcgtctgtccacgctaccatacattccgtattgatattgatcttcgcgtggccgagtgtgatggcttttttgatctgatcctgcggaatcccggatgccccatgaagaacgaggggaatatcagtcatgcgagagatagcctccatttccttaaatccgagattcggctcaccctgatatttgccgtgtacagagccgagggcggcggccagcgcgtcgatattggtttctttgacgatccgctcacattccgcgatatcggcatagcggaccccgccgaccaggccgtcttccattccaccgaccgtgccgacttcggcttctactgacacgccgtgttttgcggcataatcggtgacttcttttgtcatcgcgatattctcgtcaatcggctgatgggagccgtcaatcatcactgagctgaatccggcatcaatggcctgtctacagcgttccgcactgctgccgtgatcgagatgaagcacgaccggaacggtaatcgccatgtcctccattaacgcgccgaccatggcggcaatcgttttaaatccgcctaaatagtcgaccaggcgatcggaagccgcggcgatgaccggtgattgctccttttgcgccgcctgcaaaatcgccttcgtccactgcaggccgttgatattaaactggccgatcgcatactgctcccgctttgcatcttcaagaagctctttcatcgatacaaaagccatgtccacccctcctttatccattacatgttgaagtattttgatacgacgtccactgttgtttttttcgctgtttgaatggcttcctcagcagtcagcttatagtattcaggccggaatagctcaaccgatacaacatcagagaagccgatttccttcagtgctgataagtgggcatctaagtcaattgccccttgtcccggccatacacgatcctcatctgttaaaaagccgattgggaaatcttctgtatcatcgatatgatagatgaagattttctttccgtccgcctgctttaagctctcaatatttgaacccattgcatggaagtgaaaactatcaaggacaagcccgacattgtcacggttaactgtgtttacgatctcatacgcctgttcaaacgtattgaccgtacattgcggatggccgacaaattcaagcgcgatttttacgccgtacggctccgcgatatctgacagctcagtcagcacctctacactgctctttttgatctcttcttttacaatcttctgctctgtcacaagcggaacggccaccacatatttcacaccgagggttttgcatgtttccatcatgcctttaaattcagtgatgatctcgttgtggcccttttcatcacggttgttgaagaaaacaagcgcgtttagggcaagcggtttgatgtgatgggtttgaaaatattccgcaagatctgccaatgaatgatcttttaagtactcgggcagcttatccattgtgcggatttcaatataatcatagccgtgcttttcgcatagttctaaatcctgtttaaggtttgagttttccaatgttgtcgcttcattaaaacaaagtttcatgccagactcccccatctgcgttttagatatgaagggagttcggcaggaaggctgtcgccatatcccgccgaactccatgctcagcttatgccagacctaattcttctttcattttcttaagcataaatcggcttgattcatccgctctttcatcgacccaagcaaatacggcattcgtcgcaattccgtcgaacttcatctctctcagttttctgaaaatcgtatcaaaatcaacctcgccttggccaatgtccaaatgctggtgaaccgttactttcgcgtcaggcggattgacgatgtagcgaaggccatgagccgctttatgattataggtatctgcaaataaaacatgtgtgaggcggtcgccggcttcgtcaaacatggtctcgatgtcgcctttgccgtcatcatagaagaacgtatgcgcagtcgagtagacaagattgatccaatccttgtcaagcgcgcggatcatatccatcgcacctttgtgcgtttcgataaaatcgtatgggtgggcttgaagattaagtttaataccttctttttcaaagactggcagaagctcatccatggatttgataaatttttcttcacttgttaaaggatcatattttgaaccgctgaattcgctgttcatcaaatccacttcaagttcaaccgcaatttcgattgcccgtttccaattgcgcaccgctgcctgccggcggtcttcatcaggacccgcccagtggtaaagaggaagaagcgatgaaagcttaacacctgtatctcttaaaaggcgctttaattgtttgatctttgctgaatcaactttcggatatttataaaacggacaaaaatcctcacgcggagacaattcgatatattcatagccaagctccgccgttttatagaccgtttcctctaaagttaaatcatcacgatacatggatggatccaatgctaacttcatattttcactcctctgttttttagttttgaactgttgtaaaagattgatagaattccggtttttccttcaattcaaccttttctttttgtccagattcctgggcttttacacacgcgtcagtcgtgacagcagcaatatagccgtcccatgccgtcggtccgctgacctcgcctttcttttgaatcgaatcaataaagtcttggatttccacatcatacgcagcgacaaagcgtctctgccaatccatcaaaatatcagtactgaatctgccttcttttctcaagctgatgcttgatggctcgggaagcttgatgatgccgtcttctccgacgatttcgcattgaatgtcatagccgtatttacagttcacatagatttcagcattgatgacgataccgccttttgtttcaattacgacgatttgcggatcttttaaatgcggcagcgcgtttttcgattttttcgggtagatgacttgaacggactcgtagtcatcgttgacgagccagtgcagcacatcaatttcatgaacaagcgtgtcgactacggccatatcggttgtgtagttatctcctacagtcgggttgcggtgcgcgcagtgaatcataagcggttcgccaatcacatggttatcgagtgcttccttcagctgtacgtaaccgctatcataacggcgcatgaagccgacttgaacaaggcgtttgcccactttgatttcttcttcgacgattcgcatgcatccttcagccgttgtcgcgagcggtttttcacagaacacatatttctgggctttaatggctttcagcacgcttgactcatgcgcaggcccccagcttgtcactaaaacagcgtctacattttcgtctgcaagcaagctgtcatcattcggataaaccgtcgcgtttaattggtattgctcaacgaccttttgtgcagcttcttgattaacatccgttacagctacaatttccgcgccggacagcttgttcgtgatgcggttaatatgttcttttccgattgctccagttccaattacgccaatacgtaaactcattgacagccactccttctgttgattacataattttgctttctgtttcttgctttacttggctctgaggagatccgtagagttcctcttgaatttgttcaagcgacttgccagacgtattcggcgcaaagagcagcccgatgatcatactggccgtcacacatccgagaagaattgcagccatcgttccaatgccgaaattggtgataatcattgggacaaacagactccaaatccctattgaaatacggacaaggaaaaacatcagcccttgtgcggaagcacgatattgcgtaggaaagatttcactggcccataactgatagttcgcttgctgccctgctccgttattgatgccgatcacgacaataaacaggagcagaatcggcaggccttcaattggcagcagaaacagtgtccacccgatcaccgccatgaaagcggcgattccaaatacggtttttctatatttgtcggcaaagggcatgaagatcaaggcgacccccaatcctgtgaagataaacagccccatttgcaaaaggttggccatgttggcagatacaccgccgacctgctgataaatgtatggcataaagaagcccatgaccccggcagctaagttccaaaccaagtacacacccatcaaaaacaatatgctttttagatacataggcttgagcaaatcaaaatacgatgtcttattcagtacagccggcttctctgcctgagcatcctccggctgattttttgtctgccaggcgtctgattccggaagcctgattctcaggatgtacgtaatcagcgcaatcacaagcagatgggcaaatacgattttattccccaagagtcccaagtcaccggccagtacggagagaagcagtacaacgacagcgcccgcggcccaagcgacttgtgctacgccgcaatgcctggcccgattcttctttggcgcattttccgcaataatggtccatgacgcggttatatcagctcctactgataaaccgataatgatgtaaccgcttaacaacatggggaaattaaccccgaacaaaaccaaacaaatccctagtgcataaaccagcatactattggtataaacagccttccgtccgactttatcagccagaaacccgccaagcagcgcgccgacagcggcagaaatcgcattcgcgctcagcgcgccgagcagcccgatttgcgtatcggatagcttaaggtaactgacccataatgataaaccggcggagcctgccacaattgaaccggcatcaatatagttggccaatgctgccgcgattgtccgtttattgaaggctgaatctccattggtattgcccatatgttcattccccattaagccagatccaacaactgctgatcaatatagtttctcgcaatcaatgcatactccagcgggtttgcaacatcggggtcctgttcagcttcaatgacaatccatccggaataactgtgcttcaacagcagctgatatacttctctaaagtcaatgcagccgtcaccgggaaccgtaaacatgccttttaaaaatgattgccggaacgattgtccttcgagcctgcattgttccatgacattcaggcgggcatccttaaagtgcacatgcttaatgcggccgatatgcttctcaagcatccccatgtaatcgccgtcagaaatatacgcatggcctgtatcatagaggaggtgtacatgcgcagggtctgttcctgccatcaggcggtccacttcttccgctgtttggacaccagtgccgagatgatgatgatagacaagcttcaagccatgctgagcggcaatttcgccaaggtgattcagcccttcgcaaagccgctcccattcatcatccgtaaagtgcggcttctctgtgaacacatttttctccaagccttgcacgctgtacgtttgttcagagacaactgcgacatccgcgtttacttgctgcaaatactcacaatgcagggtaaatgtctttgccgcttcaccaagtccgtcacgcaaaataaaactgctgaaccattttcctgcaatgcgtaagttccgaagcttcagctctttgttcaggacggcaggttcggggaaaaagcccccgacttccgtgccttgaaaacgtgcgacaacgatatcacttaacaaatgctgaagtgtatttcccgctccaatttcaggcatgtcatcattccgccacccaatgggagcgattccccacaggatttcatttttgcccatcttggtgcctcccctctaatactgcttcgcagattccagctttttctcttttgcttcgtatgccttctgaacgctttcttgttcagatacctctgccaccccgacatgccaccagctgtcatagccgtccgtcattgttttaggcagaaccttcatttcaattaatgttgatacatcctgtttcttcgcatcctctaacgccgcttttaattcttctactgtgtttgcacggtaggttttcgcgccgtatccctcagcgactttcgcgtaatcgacattcaggatttggttgtcatctgtgcggaactcgcaatagtagctgccgctgccgtgatccatttgcaggttgttgatgcatccgaatcctgagttgtcaaagagcagcacattgattttcttgttgtattgaatcgccgtgatcaattcagaatgaagcatcaggaagctgccgtctccgacgattgaatacacttctctgtcagggtgggccagtttaagaccgagtgtcccggacacttcatagcccatgcaagaatacccatactccaggtgatacgtattcggaacattagaatgccacagacgctgcaaatctcctgggagtgagcccgctgaacagatgatgacgctgtcttcaggaatcgtctcgttgattgtcagcaatgccgttgtttgcggaagctccgtattcaacgcgtcagcatattcattcaggacctcttgagaaaaatgatttttgatttccggatcaaatgcttcccgcttaaacgtcactttgctgagacgctcgcgttcagctagccattcgtccttcagctcccgaatcgttgtgccgaactcgctctcatagccttcaagcaagccatgcagtttgccaagcgtcgctttcgcatccgctaccacttggaatgcatcaagtttatacgcctgcattcggctgacgttaatgttcaaaaacttcgctttatcaaaatcaaaagcggtcttagaggatgtcgcaaaatctgtataccttgtgccgatgccgataatcaaatcagcttggcgggccgctttgtttgccgcaagtgtacctgtgatgcccattccgccaaggttgttcgcaaaatctgcctcaacagtagactttcctgcctgcgtttcaactaacggaatgttataggcttcagaaatggcaaccaattcatcgcgcgcaccggaatattttgcgcctccgccgacgagaatcacaggttttttgctggatttaatcagctccgccgcaccttgaagctcgcgctcgctcggctgcatgcgatcaatatagtgaacccgtttgacgaagaaactttcatcaaaatcgtatgcttccccttcaacatcctgagaaatacaaatcgttgccggacctgcttttgccggatcagtcatgacttcaaacgcgcgcagcaaactgctcatcagctgctcagggcgcgtaatgcggtcccagtatctcgatacaggcttcaatgcatcgtttgtcgtaatcgccgcactgtattcttgctccatttgctgcagtacagggtctggctgtcttgtcgcaaatgtgtctgccggaatcaagagaactgggatattgtttgccaatgcagtgccggctgccgccaccaagttagccgctccaggtccgacggatgtagacaccgcatatatttttcttctcagcatttgcttgctgtacgccatggccgcatgcgccattccttgttcatttttcccttgatagactttcaaatggcctgcatcctgctcaagcgcctgcccgatccctaatacgtttccatgaccgaaaatcgtgaagatcccttcgacaaaaggctcttcctttccatctacatggatgtactgctggtttaagaatttaatcagcgcctgtgctgttgttaagcgaattttcttgcccacaaacgatcccacctttactcgatctttttcaattatgactgtgcttcaataagctgtacgatttcatcagcagtcggcatcgcttctgacgaactgtgcttgctcaccacaatggaagctgaagcactgccgtatttcaatgccgtttcgatgtcttttccggtgacaaggccatagataaaggctgacgcataggagtcaccggctccaaaagttttcagcacttttgtcttgtacgcttgagcgcggaatacctcgccggatttgctgtatgcgtaagagccttcgacgccgtgtttgatgacaacgaggtcggctgaatggccaaataaatgattgacggattcttcattgcttccgcctgtgcggttttccatcacatcaaattcatcgcgtgtgccgatgacgatatcagactgctcggcaaccaaagaataataaacggctgtttcatctgatgactgccacgtatacgggcggtaatccagttcgaacaccactttaacctgatgcttcttcgcgtattgaacagcttttaataccgcttcccgtgacgggcttttggcgagcgctgtcccggaaacaagcagcattttcgcatttgcgatatagtcttcgcttacctctgaaggctcaagataaagatccgccacatcatcgcgatacattaaaatgctgcattcttcagggctgaggatttctgtaaatgcaaggcctgctttgtgtccatcttgatcaacaaccatctgtgttgtatcaacgccggtctttctcatataggactctatgaatcttccatgctggtcatccggaattttgccgatgaagcccgcttttaagccaagcttcgcgctgccgatcgcgatattcgcaggtgaaccgccgacatatttcgaaaatgtcatcgtttcttccattgggcggttgtattcgactgcgttcagatcaatacatgcccggccgatggcaacaatatcaaaagccttctcttcattgaatgtatacttcatcgtaaacagccactcctcacttgttagcgttctaaaatccattcatgcgccgggtcgttataaaacttccattttcgcgtcggccctgccatgacatttaaatagtaggatgtgtatccgtccggaacgcctaccgggtggtatcccgcaggaacgatgacaacgttttcatttcccacagtcattgtctcgtcaatagaacggtcatctgtgtatacgcgctgaaacacaaagccctgtcccgggtctaactcatggtagtacgtttcttctaagaaagattcttccggcaagttgtcttgatcatgtttgtgaggcgggtagctggaccagttgccgctgtctgtatagacttcaactactaatagactgttagctgaagggtctgaatccggaagaatgttatgaacagtacgtttgtttgaaaattgcccgcgatgctcaattccgttgtcttccgctttgatcagctttgtcggaagctgcttttccgatggagaatagcaaagcgccactcttgcgtcgctgactgctgtgatctcaaatgcacggtcatttgatatatagacgctgtctgtcggttttcgttcaaatacgctttcacgcgtgccgatattctcaaaagtcgactcatgatctgtcactgtaatttttcccgttaccgccacaatacagatttcttgttttttcaattcttctgtatagcttgaacctgatgcaagatctaacactttaaactctacataagtgagatcagagttggatgtcgttacttcgtgcacgagtttgaccccattagacacttcatgcgactgcggcttacgcaacaaataactcatagagaagccctcctctttctattggcagaatgagtccgaacagcgcacatggacgccgttcggctgttcgtcgtttagttgaaatcaggtgccggatatcttgccgtcaccacttttttacgtgtatagaagtcgacgctgtcttttccgttcgcatgcagcgttccaaagaatgaagatttccagcctgagaatgggaagaacgccattggagccggcacaccaaggttgatgcctagcattcccgcatcaatgttttcacggaagtagcggattgcgtttgagttggatgtgaacaagcaggcgccgttcgcaaactcagacttattggcgatttcaatcgcttctttcaggtttttcacacggatgacagataagaccggagcgaaaatttcatctttccagatcgtcatttctgttgtgacattgtcaaagatcgtcgggccgacaaagtagccgtcgtcagacacattttcacgtccgtcacatacgagtctggcaccttcttcaagacctttttcgatatagctgagcgtgcgcttcttgttgtcttcgcgaatcaccggtcctaagaacacgccgtcatcaaggccgttaccgattttaatgtccgccactttttcctgcagcttcgccataaattcatcggcgattccttcttcaactgtcacaaccgcacaagccatgcagcgttcaccggcagaaccgaaggcagctccaacgatgtttgtaaccgtgtcttcaagattcgcatcgttcaagacaatcgtatggtttttcgcgccagtcagagattgaacgcgttttaagttttcgcttccttttttgtagacgtattcgcctactggcttggagcctacaaatgaaatcgctttaatttcgggatgctcgaggatgccgttcacaacgtcatgcgcaccgtatacgacgttgaacacccctttcggaaggcccgctttttcaaaaagctcaaccaatttctctgttaacagcggagtccgctcagatggctttaaaataaatgtgttgccgagcgcgatcgccatcgggaacatccagcaaggaaccatcatcgggaagttgaatggcgcgattccgccgacaactccgattgggtaacggtagttcgccgcttcaacgtccgttgcgatggaagcaagtgagtcacccatcatcagggaaggtgctccagcggcgaactctacgttttcaatcccgcgtcccacttcacctaaagcttctttcgtgttttttccgttttcaatggtaattagatgagcaagttcttctttatgctgagacagcagctgctggaagttaaatagaattctggcgcggcgaggaaccgccacctttgaccatgttttaaatgcttcagccgctgtttgcgctgcgtaatcaatatcctcttttgtagaaatcggcacttggcatagcacttctttcgtcgccggattgacgacatcttcatattgatctgttttgctttcaacccattcaccgttgatgtagttttttaattttctgatttctgccattcttattgcctccttcattagtaaacacatacacttgtatggatggttccggatagattcatatcaatatccacttttcagcaagccaagaattaaacgctttcaaaaacaccaaaaaaataaatggcggatgcatatttacatacaagcaaccatttcatgcacaacaggttactttttggtcatttcttggttatattctaatcgcataatacccataagtcaatcataaacactacattttttcattatttttattatattaatcttttaatcaagtaagagaagtaagagaaggccgtccaatcttgcaaaagatatacaccgatgttatcattttttaagcaactattgattaacttttggtttttattatatatttatgttacgtaaagattcaagaaggagttttttatatgaaactgatgcggattcaggaaatggaggagtacattttatcgcatggcactgtttccttagatgagctgtgccaggtgttcaatgtctccaaaaacacagtcagacgtgatatcaacaagctaacagaaaagggtgcgattgaaaaagtatacggcggcgtaacatctattgaaaaaaccgcattagttccttttgaaaatcgcaccattcagcaccaggatgaaaaaacaaaaatcgcccattatgcttcccgatttattgaagatcacgatttggtcttcattgattcaggaacgacgacaaagtctattcttgatacgcttgatccagccaaaaatgtcaccatcttaaccaacagtttagacattatcaatgcggcgtcagctttgaagaatatcaacttaatcattatcggaaacaactataagagaaaaacccgctcctttgtcggcatggacgacccggctatgcttgataagtacaatatcaacaaagcctttatgtccgctaccggaacgacgctgactcacggattgaccaattcggatctgctggagtatgaaattaaaaagaggatttcagaaaaagcaaaagaagtgtatctattggctgaccattctaaattcggaaaatcaacgcttctgacgtatgcaccgtttgacaggctgcattgcattgtgacctctcagccattagacgacgagtacacgcagtactgcaatgagcatcaaatcggcattcatctggcctaacgtttacaatagtgttgagagtctatcatccattttattctaggaggcagatcatgaaaaaagcgaagctcggaaaatcagacttgcaggtattccctatcggattaggaacaaatgctgtcggaggacataacctctacccgaacctaaatgaagaaaccggaaaagaattggtgcgcgaggcgatccgtaatggcgtgacaatgttagacaccgcttatatttacgggatcggccgttccgaagaattaattggtgaagtgctgcgtgaattcaaccgtgaagatgttgtcatcgctacaaaagccgctcacagaaaacaaggcaatgactttgtctttgataattcaccagaatttcttaaaaaatcagttgatgaaagcctgaagcgcttgaataccgattatatcgatttgttctacattcacttccctgacgaacatacgcctaaggatgaagccgttaacgcgctgaatgagatgaagaaagccggaaaaatccgctccatcggtgtatccaacttctctttagagcaattgaaagaagcaaacaaagacggtttggtagatgtattgcaaggcgaatacaacctgttaaaccgtgaagcggaaaaaacattcttcccgtatacgaaggagcataatatttcatttatcccttacttcccgctcgtatcaggtttattggcaggaaagtatacagaagatacaacgttcccagaaggcgacctgcgaaacgaacaggaacacttcaagggcgagcgtttcaaagaaaatatcagaaaggtcaacaagcttgcgccgattgccgaaaaacacaacgtggatatccctcacatcgtattggcctggtatttagcaagaccggaaattgatattttaatcccgggagcaaaacgtgccgatcagctgattgataacatcaaaacagccgacgtgacgctttctcaagaggatatttcatttattgataagctgttcgcataagaagaaaacagccttctccattggagaaggctgtttttttgtgcgataaattcctaaataactgattttgaagcaaaaccttacaaaatgagccataaatccgataaaataaaggtagtttatctcagaaagaaagtgattgagaaagcaaaagtatgaaacgttcatatcatctagctcatatgaaataaagctgacccagcttcttttatttgctggtcagaatagcggaccatttcgatggtctatggaggaaacagaatgaaacttaaatatgtaaaagccttagttgcagtaaccgttgctttaggtgtactgctgccatcaacgatttctcatgcaaagagctttagcggccgctcatcatctagttacagcagccgaagttcaagctcgtcatacagcggaagctataaatcaagcccgaaatcaagctacagctcaggatcaagctcttctagcaaaaaatccaagacgcctgacgattcatcatcatcgatttcgcttaaaaagaagccttcggaaaaggcaagctcatcaagctctaaaaaatcgtcaggcaccttttccggcgctacatcaaaagtaaccggaaagacatacagcggaaaaacgtctaaagcctatgttggcggacgatatgtttcagtcaatcattactatcacgcaggtttcgcgccatcaggatggtttggatattatagcggatttacaatgggtatgttcatgatcagcatgatgcacccatggggttacacctatcatccagtcggaggcccaggttatgtttcttatggcgcttcacccattgcctggatcgttgatatcatcgctttgattattattttaatcattgtcatcgcactgattcgcgcatttaaagcaccgaagacgtacagaaggagattttaggcaatgagattaatattaaatgagcaagaaattgtagacggaatttgcgtgtatatttccaatgaagaagatatctaccctgaagacgttgaagtaaaggagctatcttataacaagcgtacagggttcttcgctgaagctacatttggcctgcaccacaagcagcttatgtcagatgacatttcagaaggcattattcagttcttagaggaataccacaacttcaatccggacgttaccgtcgttgaattgcaatttgataagaaaaaaggcttctccgccttggttttcgtcaacgaagcagaagaataaaaatgtcttaatcaaaaccttactccgcgcgggtaaggtttttttaatggtttctctgagcataaagttatttcgtttttcctaaactcagcggatctgtgatcatctcttttggctttaacgtttccgtttgttcaaaacaaatgtttcaaatgagataggaaatgggtactaatctattaactttgttatacattttagatactcattggctcaacaactgaggaggagacatttgtgaagaaagacacaaggaaatatatgatctactttttcggcgctttagggggactgctatatggttacgatacaggtgttatctccggagcactcctgtttatcaataacgatattcctttaacgacattgacagaaggattggttgtcagcatgctgctccttggcgcgattttcggttcggccttgagcggcacatgctcagaccgctggggcaggagaaaggttgtatttgtcctttccatcatttttattatcggtgcgctcgcttgcgcattttctcaaacaatcggcatgctgattgcatctagggtgatactcgggttggccgtcggcggttcaacggcacttgtgcccgtgtatctttccgaaatggcaccgacgaaaattcgcgggacactcggcacaatgaacaacttaatgattgtcaccgggattttgctcgcctatatcgttaactacctgttcacaccgtttgaagcgtggcgctggatggtcggtctggctgcagtgcctgccgtgcttctattaatcggcatcgcgttcatgccggaatcgccaagatggctcgtgaagcgcggccgtgaagaagaagcgagacgcatcatgaacatcactcatgatcccaaagacatcgaaatggaattggcagagatgaagcaaggggaagcggagaaaaaagaaacgacactcggcgtgctgaaagccaagtggattcgccctatgcttctgattggcgtcggtcttgccattttccagcaggcggtcggcattaacacggtcatctactacgcgccaaccatttttacgaaggccggtcttggcacatcagcttcggcgctcggcacaatgggaatcggcatcctcaacgtcatcatgtgtatcactgccatgatcttaattgaccgtgtcggccgcaaaaaacttctgatctggggaagtgtcggcatcacactgagccttgctgctttatcaggcgtgctcctaacgctcggactttccgcatcaacagcgtggatgacagtagtctttctaggtgtctatatcgtcttttaccaggcgacatggggtccggtagtgtgggtgctcatgcctgagctcttcccgtccaaagcacgcggagccgcgacagggttcacgactttggtgttatcggcggctaacctgatcgtgtcgcttgtctttccgctgatgctaagcgcgatgggcatcgcatgggtctttatggttttctcagtcatttgtcttctctcatttttcttcgcgttctacatggtgccggaaaccaaagggaaaagcttggaagaaattgaagcaagcctgaaaaaacggtttaaaaagaagaaaagcacccaaaaccaagtgctgaatgagcgtacattataaaaaaaggaatcgtctccttatgggacgattcctttttctgtttacaccatgaccttgcaaatattgttcgtaaattccacagggtcctgaatcggcaggccttcgatgagaagcgcctgattgtacagaaggtttgtgtacaggctcagcttctctttatcttgttcaaacgcgtcctgcagcgtttggaatacctcgtgatttgggttgatttccagcactttttccgccttcacattttggctgtcaggcatcgcgtttaagattttttccatctcaattgtcacttcgccgtcagcagcaaggcagactggatgtgatttaagccgttttgagattctgacgtttttcactttgtctgacagaatgtttttcatttcctcaaacagatccttatacttgctttcctcttcctcggactgcttttgatcctcatccgtgtctatgccaaggtctccgcttgatacggacttgaattctttttcctgataagaagccagcattttaattgcaaactcatcgatgtcctcagtaaagtagaggatttcatagcctttgtccgccaccatttccgtttgcggcagtttctcaatgcggtcgtaagaatcaccggtcgcgtaataaatgaatttctgctcctctggcattctggaaacatactcgtctaagctgaccagttttttctcttttgaagagtagaataataggagatccttcaattgatccttattcgcgccaaaatcattgtacacgccgaatttcagctgtctgccgaacgacttgtagaacgtctcgtatttctcgcggtcttttttcaacaggctttgcagctcgcttttgattttcttgctgatgtttttcgcgatcagcttcagctggcggtcatgctgcagcatttctctggaaatattcagcgatagatcctcagaatcgaccatgcccttcacaaagctgaagtggtccggtagcaggtctgcgcacttattcatgatcagcacgccattggaatacagctccaagcctttctcatattccttggaatagtagtcaaacggcatgttttcagggacgaatagaatcgcgttgtagcgaacggctccatccacactgatatgaacgtgtgtcagcggtttatcaaacccgtaatgcttttcagcatagaatttttcgtaatcctcatctgtcagctcgcttttgttttttctccagatcggcaccatgctgttgaccgtctgctcttcctgcacctcttcaaattcattttcgctgccttccttcggcttattaatggttgtatccattttgatcgggtagcgaatgaagtcggagtacttcttgatgatcgcttttaaacgatattcctctaaaaactcgtcatagctgtcatcttctgtgttctctttgattttcaggataatgtctgtaccgacagaatccttttcacacggctcaatcgtatagccgtctgcacccgcagactcccatttataagcctcttcgctgccaagcgctttactgatgactgtcacgacatcggcaaccataaatgccgcgtaaaaaccgacaccgaactgcccgataatgtcatgtccgtctttcagctcgttttcctttttaaacgcgagggaaccgctttttgcaattgttccaagatgctgttcaagctcatcctttgtcattccgatccccgtatcagagatggttaatgttctcgcatctttgtcagctgcgacctttatgtagtaactgtctttatcaaacgtaagcgcatcgtccgtaagcgctttgtaatagattttgtcaatcgcatcactcgaattggagattaactcgcgcaggaaaatttctttttgggtataaatggagttaatcatcatatccagcaagcgtttagactctgctttaaactcttttttcgccactcttgatcgctcctttaccattatgtaaacccttttcagcatctatttatcacataagatgacaattgtcaatcaggttgatagatgcatatatatgtaaatttaacattagttggatttgttttcactctttttctcactcattctcataaaaaagagaggcttcatcatcctctctttttttctgtgtcattccagcggccaaactcccgcttcatccatatatgcaccgggtagaaaaacaaaccgaacggtatcaaaaacaatagattatgccatgaagcattcagaaatgcgcttgcagtcactggaaacgtaatctcttgcaataaaaaagagatgacagtcagcacaacaaatgcagatggaatggtcacgatgcaataaaacttgagctccttcttatgctgtaccttcaaacttagaaacctcccaacaatttctaattcatcttaacatatgctggcctttcttttctcgcatgtttatcactgcacatagcgggaagacaaatagaaaaaggaggtctcgtatcatgggaagacttgaaaacaaaacagcagtgatcacaggcgccgcgacaggcattgggcaagcgacggcagaggtttttgccaatgaaggcgcgcgtgtgatcatcggagatatcaataaagatcaaatggaagaaacagttgacgcaatcagaaaaaacggaggacaggccgaatcctttcacctcgatgtgtcagatgaaaacagtgtgaaagcatttgctgatcaaatcaaggatgcatgcggaacgattgatattctgtttaataatgccggcgttgatcaggaaggcggaaaggtggacgaatatccggttgacctgtttgaccgcattatcgccgtcgacctgcgcggcacattcctttgcagcaaatatttgattccgctcatgctcgaaaatggaggctccatcatcaacacctcctccatgtcaggccgtgccgcggaccttgaccgctccggctacaacgcagcaaaaggcggcatcaccaacctgacaaaagcgatggcgatcgactacgcacggaacggcatccgcgtcaattccatttcaccgggtacgatcgaaaccccgctgattgacaaattagcaggcaccaaagaacaggaaatgggcgagaaattccgcgaagccaacaaatgggtcacgccgctcggccgcctcggccagccgaaggaaatggcgacagtggccctgttcctcgcgtcagacgacagctcatacgtcacaggagaggacatcaccgcagacggcggcatcatggcatacacatggccagggaaaatgctgattgatgagaaatggaagaaagaaacgaaataagagaggggatgtccctctctttttgtctttcaaagcaatacaaccttatactttttcacatccaaaaactgcaaaaattccctcgccagcacttcaggcggatgcgcctttccttcatccagccgatacaaaagcaacccgataatcattgcggatacataatgggcataaagctttttctctgcgtgaatatcagtttgctgatgcagataaaacgattccagcgctttgaacatatcaggtatcacatgaggaacaccccattcccgattgagaaaatggacaatgggcatatttgacaaagcagaaagcagactggcgagcgccttctccgcttcctttaaggaaaattcattcgggctggaggcaatcgtcaggtgatcaatgatctccgcacatgatcgctgtatcatggttcggagcaattcctccttattggcatagtgatcataaaaggttgcacggcggatattgcttttccgggtaatatccgaaattgtgatggctgcgtagtcttttttctccgccagcacgtccagaaatgccttctggagcgcctctctcgttcgaaccacacgcctgtcgatttgcttgtccttctctcgctctcctggcacagcttgtccaaacagccaataaaatctcttttgagaaacaagctcccataccttttggctgatagcttccggagtcgcggccgcatcctcattcagccaatacaggataatcgcgtacgtgtacaaggcccggtaatgtccgtaaatttcccgttcgatcggcgtcaaattcacatggaccggagtcagcagcacatcctgctgaaacacatccttaaaaaaacgatggaaatgccctctgttcatcatcacagaaaaaaaggatcgatgctcatgaacaaaggacagcgtcggatgcaccgtttgccgttttttgttcaaatggagggtatccatatgactgaaggcgccaaaaagcgctttgcccagcccttccttcttgtcttcgattaaatcctcaatgattgaaaacttatcctcataataaaggtagagcgatccgcggctcactttggccttttcagcgatttctttcattgtgatgtgttgaatatctctttcttccaataaagccagcagcgcctctttcacttgagcttcggcagattccggcacaaaagacacccccaatcattagacagatcttcgatatatgtacggtaacgtatagatggttcaccgttgtctttcttacagaaaaggtaccaccttataataggtccgagaaaagaagaaagcaaatgagggggattttacaatggaacagcaagtaaaggacgacatccagcgtgtctttcagcttcagaaaaaacagcaaaaagccttgcgcgcttcaacagcggaacagcggagagaaaagcttcaacgctttttagattccgtcatcgcccatgaagaagaaatcatcgaagcgatccgcaaagacgtccgcaaaccatatcacgaagtcaaaaaagcggaaatcgaaggaacaaaaaaagcgattagagataatatgaataacctggaacaatggatggcgcctaaagaagtcggttcatcgttaagccctgacgcaaacggaattcttatgtacgagcctaaaggcgtcacactcatcctcggcccgtggaactatccgtttatgctgacgatggcgccgcttgccgcttctctcgcagccggaaacagcgcgattgtgaagctgtccgatttcacgatgaacacgagcaacattgccgctaaagtgataagagacgcttttgatgaaaaagaagtcgcgatttttgaaggagaggttgaggtggcaaccgaactacttgatcagccgttcgaccatattttcttcactggaagcacaaatgtcgggaaaatcgtcatgacagcggctgccaaacacttggcatctgtcacacttgagcttggcggcaagagcccgacgattattgacagtgaatacgatctgatggacgcagcgaaaaagatcgccgtcgggaaattcgcaaacgccggccaaacctgcatcgcacctgattacctgttcattaaaaaagacgttcaggacaggttcgcggggattttacaaacagtcgtcaacgctggatttatggaggatgatcataccccagaccgcagcaaatttacgcagatcgtcaatgaccgcaacttcaaccgcgtcaaagatctgttcgacgatgccatcgaaaaaggggcggaagtggtgttcggcggcgtatttgatgccagcgaccgcacgatctcgccaaccgttttgaaaaacgtcacgcctgatatgaaaatcatgcaggaggaaatcttcgcaccgattctgccaatgatgaactatgaagacatcgacgaggtcatcgattacgtaaatgaccgcgataaaccgcttgcactttatgtgttcagcaaaaaccaagacctgattgacaacgtccttcagcacacgacatcaggaaatgcggccatcaatgatgtcgtcgtccatttcagtgacgtcaacctgccattcggcggcgtcaacacaagcggaatcggctcctatcatggggtatacggattcaaagagttttctcatgagaagggtgtatttattcaagcctctaaataatcataatgaagagaatctgcatcatcttgcaggttctttttttatctttatatcacctaaataaagagattaaaagtgataaaatacaattttcaaacgagacaaaattcctctagtctatctcattgaaaccctgcagcccctaacgtataatacccagaaaactttaaaggagtaaaatgatacatggaaaaaccagcaggattttggattcgggcagccgcctctattattgatgtatttattatagctatattctctttcattatgattttattaacaccttcattgtgttgccactcattgatgcagcaggtacacacatgtcagaagcccgatatgagtttttcatgttgatcattggcacaatccctgttttggccatcatatttattttcgctattctttactatagcttgctgacttcctcaaacatgcaagcaacattgggaaaaaaactcatgggcatcatcgttgtcaatcagtatagcgagcgtatttctttttggcacagcttcggccgtttcttcgcttacacattatttaagatcttatatatcggttttatcatggcggcctttccctctaaactggcattacataattatatttgcgggacaaaggttgtctataaaaataaatatcttgattgatcaaaaaaacaggctgccgagttaacctcgccagcctgttttactatttcccaaaagccatcagcttcgtataacttccaatataaagcgttccgtcctcagcgagctgaggagatgacactacgttgctgtcggtttgatatttccataattcattgccgtttgcgtctgccgcataaaccttcatatcatctgacccgaaataaaccgttcccttcgcgtcaatcagcggcgccgttctgacagggccgtctgtgtagaatgaccagttcatatccccgtttttgctgatggaaaacagctcgccgcttcctgagccgatgtagatattgccattatgatcaatcgcaggagatgagctggagaacccgtttagcgggaatgtccatttcaaactgcctgttgatgtataagcatacagctgtccatcttggttgccggcataaatgtttccgtccttatcaatcaccggatatcctttaaacgcatttgacgtcgttctggaccatttcacctgtccggttccggagttgatcgcataaaacacgtaattatatgtgccgacatacacggtgccgtttttggcaagcaccggcacagagctgacgacaccatttgttttcaacttccagcgctctgtccaggttgattttgacgtcggtttgatcgcgtgaacataattatcaagtgttgagaaatacaacgtcccgtctgaaccgatcaccgtttcagagcttggcccgccgcttaacggaaccgttgttaaaatttctcccgtttctttgtcaataaaataaatctttttgtcataggatgccaaatagataacgccgttggtcccaagtacaggagattgcgtatatgtttttccaagattgcccgtcacccatttgactgagccgtctggattaaaggctttcatttccccgtctctggaatgaagatatactgtgccgtctccgtcaatcacagcccccgctccattttgcggagtcgttctgatgtcgttttgccatttcagcgtcccatctgtatttccggcgaaccggctttcgcgtgaccagttaaacatggcaggcgccatcgcttgtacatcatatcttcctggcaaaaagccagatgctccattattttgagaaaacaccgtttccgccgcataagcagctgtcggctgaagcactttggcagcgggcacatcagaaacagcgccggccgaaacagccgccgccaccgcagctcccgcaatcaaagctttcatacgaaatgacttgaccatcattgagacccccattatatgtaacttctaatttgtgaccatcataacatattcatccattttataaatctatttcacaaaaacatcacaaactagaaaactatgtaagagtattcacggacgttttttcagcacccggccgaaatgcagccacaaaccaaatgacgttgacagcagccgcagcgagactaattccgaaaacaaagatcacctcagaaagcagatggtcactaaagaaactaaacatcaagataaaaccggccgaagacaaatgaatcaaaagcccgaagccgcaaagcaccgccatgacatacctcattgcatcgactccgagcatataaacgagaaatggaatgaaatacaatacaaggatcataccgacagctgaccacatgccagctgaattaaactgattggccgccgctcccgttccggccagcggcgtaagtgaagccgccactatcacggcgcaaaaaagaaacgcagaaatggttgtcatgatcgccacgctattttttttagacatcaaactcctcctttaatagaaatattaacctttttcattataagtaagttgaatgttatattcattatattttttaaaaaaatccagatcgtacaaaaatgatatgattctttctagtatatttatatagtaaaaaacaaaggataaaagactcatttttctgtaatatcaggattttatcaccataccatattgcatgtacttgtttttcaaagtatactattccagattaattcagaggagagagaaaaatacatggaaaaaccagcaggattttggattcgttttttagcttattttattgatggcattattgtatctgttcctagttatattattctatttgtgatcaattctgtttttgtagctggggctgtggcaacaaacccttacatgacggaagaagagtatttagtgaaatacatgacgcttgcatttttgcctactatgctgatcatgatcgtcatcagtgtgttatattacgggctgctcacagcttctaaaatgcaaggcacacttggcaaaaaaattcttggcctgaaagtggtcaatgaacaaggtgaacgggtttctgtcggacagggaattggccgttactttgcctatatcttatctggaatcatcttttatatcgggtttatcatgatcgcctttggagagaaaaaaggcctgcatgacatcatttgcaaaacacgtgtcgtgtataaataatagaaaaaagtctagacgccaataggcatctagacttttgttttctttacaataggctgccacgacagatacgtagcgcttctccacagccactcaaacggccccatccgaaagacacgaagccaaaggtggctgaagaccatttgaacggcacaaaccgtaattgtaatgagcacaccggcagcagggtacacttttccatacaggcccaagccgtaatgataaaaaatccaagtacacacaatagactgcatcaaataattggtaaatgccatcctcccaacagcggagaatgattgcagcactgttctcactcttgttttatgataaagatagacaaccgttgtaacatagaaaaacatgaggaaaggcgcgccaatcagcagaaatagttccttttccgttacactgtacagcacatgggcgccgatgccgatgacaagcccagccatccataatcgttttaatcctttgcgatgcttttccggttcatgcaaataccgtgattttgctgccgcagctcccagcaaaaacatgctgaaataaggaatggatgcaaagaagaagttgagcggattatacgtaagcatgccattcgaagacatataaacaagacggtcatggatccgctgttctgcaatgtccttcaggctgccgcttccataaacatgaatcgcttgtgttgcctgctgtgttaccgcttgtacccattcctgtccgtttgattgatcaaaacttgtcaacatgaacggaatggaaaacagaagatacaaagagaccgcccatatcagcagtgttttcggctttgcttttcgaaacaagagcaggacaaaaccgagcaaggcatattctgttaaaatatccccgtcccatatcaaaaaggcatgaatcgttccaaacaagagaagcgccattaaccttctcacatataacggaacaaaccgtttccctttgttttctgctctctccatcatgacaaccatgccaaatccaaataaaaaggaaaacaataaaatacattttgtttgaatgaagaatttcagtatgtctgcggcggcaaaatcagcttcagaccacttatccatgaaaaaattctcttttccaagcatagacaaatacatatccggataactgaaatgtgccagattgacaaataagatgccgaaaatcgccattcctctcagcacatcaagcacaccgatccgctcatttgttaaagtcggctgtaatgaagacatagccatcacgctccttttttctgtaccttaagggtatgaaaaaatgaagcgcggaaacatcgatttaggtgtcaggccggcatgaaaaccttacaatcttgtcatctttatggtttcatcacctttaaatctaatgcttcgatattctgcaaaacgcgatcaaaacgcaaagcctgaggctcacatgggaagatgtggccttcatacgggtcgcctaacgtccggaaaaacggttcaaataaaccaggaaccaatacgcccaccatctttgtatagtaagaatcaaggcgataggagtgaacggtatttgcagggacatgcaggaaatctcccggattcagctgaatttcctggccatctgcccacatcgtcatctggccttcaaggcaataaaatgtttctgtatgatgttcatggtagtgatcaacgattcggtcacctttagggccttcagaggatacgacgataaactggccatctgtatttttttgtgcagccacaatgcggtgaagctgatctccagtcaacaggcgatctccttctccagattcaagaacgtatggaaccgctccatctggcagctctgtaagttccgctaatttggccgaacatgcaggcttttcttcatctagaaatacaatgtccgctacagcggctgcttctgcaaatcgctcgtttgagacttcttcgcttgcgtacggcggatgttcagcgtgatcatacggattcccaataacggaatacaagtgcgctacgtttcctttcatcgtgtaagataccagtcttgttctgtggctctgcatccggtagctgtgcggtgttcccgccggaatgttggcataatcacctgatattaataaatagcgttcaccatcaagtgtcagttccagtttcccgtccaaaacgagaattccttcatgtgtgtccttgtggacgtgaagcggaaaggcatctccttttcccccggaaagaagcacgatctcaaacaaatcacctgtgctcctcccattcgcaatcaccgtggcaacctgtctgccgaacagatagcgctcgccttctccgctccggagcaaataaggcattttttctttgggcaatgaatgtgtacataatgttttcatattatcgcttcctccaatttagaccagtctatatactataactttctgactagaccgttctatataattgtaggagaaaggataacaaaatgctaccctttttttctcaccagcactggtatttgttcggcaatgagaagaagaggcgttttgtctttattcgttaacgaaagcatgatgccgccctcaatcatcgaattaatcagcgttccaagctgatttgcttcttcttctgcaaatccgttttccattaattttctggcaaaaaccgcttcccagcttttaaacaccttcatgcaaaccgtccgtagcggttcactgattaacgctgtctcactcgccagcaaaccgactggaatacctttaatgctttctgtgttgtcaaattggctggctgtttttttgataaaaagctgaatcgcttcaataggatcagaggattcatccatgctttgctgtatcagatgttcaacgatcttacctgtatatgtaaccgcttcaattgctaattcttctttgccattcggaaaaaagtgataaagcgatcccttaggagcaccgctttcttttacaatctggttcaaacctgtcgcgtgatatccttgcagctggaacagacgtgacgccgtgtgaaggattttttcacgtgaatctcctctgctagtcattaaaacattccctcctaggtatggtagagcgacttatataatataaaaaagaaccctgtgattgtcaaaaggggtaagacccttccggatggggtaatgtacaaaaacagcgtctaggagggatctctcaatgacaatcgatcattcagtcacgaatacagagcagcttgaacaacagaaccccggcatgaaaacgaagatcaaactgaaaaaactcaaggatcaggtgatcgtcattaccggcgcttcaagcggtatcggacttgtcacggcgagaatggcagctgaaaaaggcgcaaaggtcgtggcagcagcgcgaaatgaagacgcgctgaaggagctcactgatgaacttaaggaaaaagggcacgacgccatatgggtaaaggcggatgtcggaaaagaagcggacgtcaaccgcatcgcagaaaccgcgatcagcacattcggccgctttgacacatgggtcaacaatgcggccgtctcgactttcggacatgccatggacgtcaccgttgaagacatgaagcgcatgttcgacacaaatttctggggacctgtttacggaacaagagcggctgtcaaacactacactggcagaggtgtgccgggcgcactcattaatgtaggaagcctgttcggagacaggggaacagtcattcaatccacatatgcgtctgccaaatttgcgcttcacggctggacggaaagcatccgaatggagcttgaaaaggaacaggcgcccgtctcggtaacgctcatccacccgggcagaattgacacgccttataacgagcatgcgcacagctacctcgacaaacagccggctcattaccgctccatgatctatccgccggaagcagtcgccgaagctatcctgtttgccgccgaaaaccctaagcgcgacatgtacatcggctcacaggccaaagccatcgccatgctgggcgcgcttttccctcgtctgaccgacagactgatggaaaaaatcatgtatcacagccagcatgccgaaagaccgtccaaaccgcgagaagaaagcgctctttatgatgcgggctgcggtatgcatgacagaggcacaaataaaggatggatgaggtcaagaagctactacacaaaagcgacgaagcgccccattgtatcggcggctgttgttgccggactagtggcttgggctgccgccaaacgatgcagataatctctgaccatgatagaaaaacccatgctgttccagcgaaccatgggtttttcagctgttaatcgataaaagccttgttcatacgctgcagcagctcgccaaacatctctttttcctgtgttgaccattctttcagcatctgttcataacgttcaaggcgcttttgctgatcggcttttaatagttgtttgccgagttttgtaatggtaaacaggctgactctcccatcagatgggtctgagaaacgatagatgagctcctttgcctctaatgcagctgcttgtcttgaaagagtagaaatatcaagcttaaacgattctgccaattccttaacacgagcaggcccaaactcatccaattgtctcagtaataagtacgaagatctctccaaattccctgttcttttctccgattgatccagataaacagctctcctgataaaagtcgtcagctcatattcaattaattcaactggattttgattttgcaatcgctctcgctccctattccaatctccggcattgacaacatcatatatacttgtataatacaaatgtacattaactgaataaatacaagtcgttatatgactaaatcaattattatacttgtatagtacaatcatataaaaagaaagtaaagcgattcctcagaaccatcctagaagcaagcaccagaaaggaggaagctgttctgattggagagcagcacttgatgtgaaagtcatacgaattattttgcaagtgttgatattatatgtattttttatgatcggggaagccattcagcatctgtttcatttacccgtgtcaggaagcatcgttggattggtattgcttctgatctgcttgggcctccgtattgttcccgtctccatcattgaagacggagcagggtttttattatccttccttccattgttgttcatcccggcaatgacaggagtgataaactatccgtctctcatttcattcaatggcctgatgctgctgattacagtcgttctgagcaccatcgtcacgatcattgcggctggattcgccagccagctattagagaaaaaagcaaaaaaacgggaggagaaagagaaatgcagcaagcatgtatcgcgatcattataattcttttaacagttgccgcttatttagcgatggtcaaactctataagcgattcccgcttccatttcttatccctgttctgacaacgaccattttgattgtagcggctttgatgatgtttcatgtttcctatgaaggctatatgatcggggggaaatggatcaattctttgcttgggccggctgtcgtggcactggcctatccgctttataaacaatggcatatcattgtcaaacattgtgttcccattttaggcggcgtcctggtcggattatgcatgggaatgatcagcgggctgatcttcgcagaagcattcgggattgatcatgatctcttattatccattctgccaaagtcgatcacaacccctgtcgctattcagatcgccgccggtcttggcggcgtcccttccatgacagtcgtatttgtcatgattgcgggcttttcaggcgtcatcctcgggccgcttttcctaaaatggcttcgcatacgcagttccctaggacaaggcattgcattaggcagcgcctcccatgcactaggcacctccaaagcattggaatatggagaactggccgtctccatgagttccgtctccatgacgctttgtgcggtgctcggctcattcttcggcccgctcgtcgtctggctgtttcatatttaacaaagaaagactgccccgggggagggcagtctttttcgtttaagaagcaaaaaaatcaatcagcggctgaaagtccttagataaatcaacgtcattcggttctgcttgaagcaggcggtcaatcatacgctccagctcctcaacatcattcttatccgtatattcaatgaagtttaagctttcaagccaatcccgatatgaatgtttggctttgccatagctgtttccaaagacaaggcaaggtgttttggtgataatcgagaaaatcatcgcgtgaaggcggtcggtaatcaccaatttactggagccgatgcggtccagcatctccataaaatgcttttcacgatcagcgtaatcgatggtgtctaccgtatccagcaccgtatcggtacgctctgtgtaagttgttttttctgcccattgcttcatctgtgaaataaaatcttcgtcagtcactttctccttatccgctcttaaaataaagagaacgccgtcccgctcgagctctcgcggcacaatatccaaggaaagcaccatgtccggtgtaaagatcacattggagttgaaggtctctttcacaacatccagtgtttgcgtctcacgcgcagcaatcgttaagtttgtattttgatggtacgcatcctgtgtttttttcttttccttctgtccttcctctgtatcctcaaaataaacggattgtggcagagaaattgatttgtagtctttaaacgccgaaaagacctttcttctgtcttcctcaatatcgagataaaggtttcctaagttccctccgcctgtaaagcagacaatatcgtcttcacgaatgatctccttcaccagttcaatgccctcatccgtcgcataatccataatctcaatgtattcataatacggaaaatgatttttgataaatttctcttccgcatacgcaatcgcttggtctccaatgtttgtgtaactaggggaaccaaacaaaaatacttttcgtttatcatttaacagagcttccggctccacatttggcgcaatgccttttactagttttttgcctttgattttttgtacagtcatatctgcgtcctccttctgggatgaattcctcattgtgtgttaactgtctctacccaaaaagaaggatggctatgcattggcatgtgcatcggctatatcagaaacatcgttttcgccaatttgatagacgctgcaatgtcccgcgccgttctttccatatattccgcggcatgttcaaacgcatcttctagcggcacggctccggggacgatgctgaaaagcgcatcgattccgtgttgatagacggcatcactgtcacgtgatactgatcccgcaataccgatgacaggcacatcatatgatttagccgccttggctacgccgatcggcgtttttccatgaaccgtttggctgtcgatccgtccctcgccggtaatcacaagatctgcatcctgaacgatactttcaaaatcaaccgcttcaaggacaatatcaatgcctcttttcaggtcagcctgaagataagtcagcaggctccatccaagaccgcccgctgcaccggcgccctctgtatctcggaaggttgatccgagctctttttctgtcatatcagcgaaatggcttacgttctggtctagtacatccagcatgtcggccgtcgcgcctttttgcggcccgaaaacagccgtagcgccctttggtcctgttaacggattgtccacgtcacaggcaacttccagtttgacattccgcaatctggaatcaagcccgccaacatctattgatgcaagctgagataacgcgccgcccccgggccaatctcgcggcctgagttatcaagaagccttccgcccaatgcctgaatcatcccggctcccccgtcgttcgtggcgcttccgccgattccgatgatcaatcgctccgctcccgcatcaagagctgctccgattaattctcccgttccccttgttgtagtgatgagcggatttcgcttatctacaggcaccagatgcagccctgaagcagcagccatttcaatcacagctgttctcccatctcccatcatgccaaagaaagctctcaccggttcccccagcggccctgtgacaacttgctctatgatccttccattggtcgcatcgaccagagattgaacggttccctcgccgccatccgccaccggcaattttctgtaatcagcacccggaaagaccgatttgaaacctctttctatcgcttcggctgcctccagagctgataagctttccttaaaagaatcaggtgcaatgatgattttcatccaaatcgcctctttcaaaacatgattcacttacgctagttatctccaatgtaccatattccatttagaaataaataccataatgattgggaaaaattttattaaaaattagaaatgaaagtgtttgcataaaagaaatattcacgttatcatacttgtatacaagtatacttcttgagtgaggaaggtgagtgtatgctagactccaaagacctgttgtatcccgcaaaatggctctcaaaagcgtcaaccggagttcgtgtcgcatacgagctgagaatgcggatcgtttcaggtctgattgaaagcggtaccattttatcagaaaatacaatcgccgccgagttttcagtaagccgttcgccggttcgcgaagcgctaaaaatactcgcatccgaaaaaatcatccgcttagaacgaatgggagcggtcgtaattggtttaactgagaagaaaatcgcggaaatttatgatgtgcggttactattagaaacatttgtctttgaacggcttgtcaaaatagacattgagcctttagttaaggatctcagcaaaattcttgaaatgatgaaagtctcaatcaaatatgaggacgctgacgaattttcatttcaagatgtgctgttccatgaaacgattatccgagcgattgatcattcatacattcagatgatctggaacaatctaaaacccgtcatggaaagctttattcttttatcgatgcgggtacggttaaaggaaaagtatgaagacttcacaaggatcttagataaccacgagctttatattcaagccatcaaaacaaaggatagggtgctgatgattcagtctcttcaccaaaactttgatgatgtgcaggataaggtagaagacctatggctctcacaacaaatgctggcaaaaggagctgaatacaacaatgactagttatatgttaggaatcgatatcggcacgacaagcacaaaagctgtgctgttcagtgaaaacggagatgtggtacagaaagaaagcatcggctacccgctctatacaccggacatctcaacagcagaacaaaatccggaagagatttttcaggcagtcatccatacaacagcgagaattacaaaacagcatcccgaaaaacaaatctctttcatttcgttcagcagcgccatgcacagcgtcattgcaatcgacgaaaatgacaagccgctgacgccatgcatcacatgggccgacaacagaagtgaaggctgggcgcataagatcaaagaggaattgaacggacatgaggtgtacaaacggacgggaacaccgattcatccgatggcaccgttaagtaaaattgcctggatcacgaatgaaagaaaagaaatcgcttccaaggcaaaaaaatatatcggcatcaaagaatacatttttaaacagctgttcaatgagtatgtcatcgattactcattggcatcagcgacaggcatgatgaacctgaaaagcttggcttgggacgaagaggcactgcgcatcgcaggcatcacgccggatcacttatccaaactcgtgccgacaaccgagatctttcagcactgcagcccggaaatagcgatccaaatgggaatcgatccggaaacgccttttgtcatcggggccagcgacggcgtgctgtccaacctcggcgtcaacgccattaaaaagggagaaatcgccgtcaccatcggtacaagcggtgccatccggacgattattgacaagccgcaaaccgatgaaaaagggagaattttttgctatgccttgacggacaagcattgggttattggggggcctgtgaacaatgggggcatcgtccttcgctggatcagagacgagtttgcctcctccgaaatcgaaacagcgacacggctgggcattgatccatatgacgtgctgacgaaaattgcccaacgcgtcagacccggttctgacggtctgctgttccacccatatctcgccggagaacgcgctccgttgtggaatccggatgtacggggctcatttttcggcctgaccatgtcgcataagaaagagcatatgatacgcgcggcattggaaggcgtcatttacaacctgtacacggtgttcttggcgttaactgaatgcatggatggcccggtaacccgcatccaagcgacagggggatttgcaaggtcggaggtttggcgccaaatgatgtctgatatcttcgaatcagaggttgtcgttccggaaagctacgaaagctcatgtctcggcgcctgcattttaggcctgtatgcaacaggaaaaattgactctttcgacgccgtgtccgacatgatcggcagcacatacagacatacgccgatcgaagactcagccaaggaatacagaacattaatgccgattttcatcaatctatcaagattattagaaaatcaatatacacaaattgcagattatcagaggggcttaatcacacacaaatagtacatgacatgaaggggagggcattaccatgccgttaatcatcgttgcacttgggatcttagcattactatttctgattatgggcttaaaattaaacacatttatttccctgctggtcgtatcgttcggcgtggcactggcactcgggatgccgttcgataaggttgtcagctccatcgaagcagggataggggggactcttggccacatcgcgctcatcttcggactcggtgcgatgctgggcaagctgatcgcggattcaggaggcgcacagcgcattgcgatgacgctcgtcaacaaattcggcgagaaaaatattcaatgggccgttgtcattgcctcatttattattgggattgcgttattttttgaagtaggactggttctattaattccgattgtctttgcgatttcaagagaattgaagatttctattttatatctcggaatcccgatggtcgcggcactatccgtcacacacggtttcctgccgccacacccgggacctacggcgatcgccggtgagtatggcgcaaacattggagaagtgctgctgtatggctttatcgttgctgttccgacagtgctcatcgcagggccgttatttacaaagtttgcgaaaaaaatcgttcctgcatcatttgcgaaaaacggcaatattgcatcactcggcacacaaaaaacgtttaaccttgaagaaacacccggctttggaatcagtgtctttactgcaatgctcccgattatcatcatgtcggtcgcgaccattatcgacctgcttcaagaaacaatcgggtttgcagataacggaattttagcttttatcagattgattggaaacgcatcgactgctatgattatttcgttattggtcgcagtctatacaatgggcatcaagcgcaacattccagtcaaaaccgtgatggattcttgttcaactgccatttcacaaatcggcatgatgctattgatcatcggaggaggcggcgccttcaaacaagtgctgatcaacggcggtgtcggcgattacgtagcagacttattcaaagaaacggcattatcgccaatcattctggcatggctcatcgcggcgatcctgcgcatttctctaggctcagcgactgttgccgcactaagcacaacaggtctggtcattccgttattgggccattctgatgttaacctggcgttagtcgtactcgcaacaggcgccggaagtgtcatcgcttcacacgtcaatgacgccggcttctggatgttcaaggaatacttcggattaagcatgaaagaaacattcgccacatggacattgctggaaaccattatttccgttgctggactgggattcattttattgttaagtttagttgtatgaaattaagaaggagctgtaacacatgttcaattcgattggtgtcataggcttaggcgtaatgggaagcaacatcgccttaaacatggcaaataaaggtgaaaacgtcgctgtctataattacaccagagatttaacggaccagcttatccaaaagctggatggacaatctctcagcccgtattacgagcttgaggactttgttcaatcgttagaaaaaccaagaaaaatctttttgatggtcacagcgggaaaacccgtagattccgtcatccaatcattaaagcctttgcttgaagaaggcgacgtcatcatggacggaggaaactcccactatgaagacacagaaagaagatatgacgagctgaaggaaaaagggattggctacctgggagtcggcatttccggcggtgaagtcggcgcattaacagggccttccatcatgccgggcggagatcgcgacgtctatgagaaagccgctcctatcctgacgaaaatcgcagctcaagtcggagatgacccttgctgtgtctatatcggaccaaaaggggcagggcactttacaaaaatggtgcacaacggcattgaatatgcagacatgcagctgattgcagaagcgtatacgtttctaagagaaacgcttcatctgccgctagatgaaattgcatctatatttgaaacatggaatcaaggtgagctgaaaagctatttaatagagattacagctgagattttacgcaaaaaagacgaaaaaacagggcagcctctgatcgatgtcattcttgataaaaccggacaaaaaggcactgggaaatggacgagcatgcaggcgattgataacggcatcccgtccacgatcatcacagagtccttgttcgcccgctacttgtcatccttaaaagaagaacggatggcagctcaagacgtattagcaggcccggaagccgaagaaaaacacttggataaagacacctggattgaatacgtcagacaggctctttacatggggaaagtatgcgcctatgcacaaggctttgcccaatataagatgtcatctgagctttacggctggaatctgccgctcaaagacattgccttgattttccgaggcggctgcattatccgcgctgatttccttaacgtgatcagcgaagcattcagtgagcagccaaatctggcaaacctgctgatcgcgccttatttcacagataagctccatgcctatcaaacaggcctgcgaaaagtcgtttgcgagggaatcagcactggaatctccttcccatgcttaactaccgcgctctcttattacgacggctaccgcacagggcgttccaatgcgaacctcttgcaggcgcagcgcgattactttggcgctcatacgtacgaacggactgatatggacggcgtcttccatacgaattggtctgaataacctgtcatcaaaaacacggtcagttttcaactgaaccgtgtttttttcttctatcccaaacaacagaagacataagttatgttttaaatatcataaacagtgatacaataatagctagaaacaatccccaagatcatcatgtgacagcagcttgctgttccgttctattctgcttttggccattgtcctttgcccttgcccatggtgtcataaaatgttcaaatgccaaaacggcctgtcattctgatttacaaaagtccctgaaaaccttgtctaattgagaatcagcctctcatttgttataaaagaaatgcataaatcctacctgtcacaccttaaataagttgaaaaaaagtaggttatcgcttgacaaaaaatatatattaattaataattcatatataattagaattattattgaaagcgaatatgctttctaatacatttttaggaggaatatacattatgtctttaatcggtaaagaagtacttccattcgaagcaaaagcattcaaaaacggtgaattcatcgatgtaacaaacgaagatttgaaaggccaatggagcgtattctgcttctacccagcagatttctctttcgtatgcccaactgagcttgaagatcttcaagaacaatatgctgctcttaaagaattaggtgttgaagtatactctgtttctacagatactcacttcgtacacaaaggctggcatgacagctctgaaaaaatcagcaaaatcacttacgcaatgatcggtgacccatctcaaacgatctctcgcaacttcgatgttcttgacgaagaaactggccttgctgaccgcggaacattcatcatcgatccagacggcgttatccaaactgttgaaatcaatgcaggcggtatcggccgtgacgcaagcaaccttgtaaacaaagtaaaagcagctcaatacgttcgtcaaaacccaggtgaagtttgcccggctaaatgggaagaaggcggcgaaactcttacacctagccttgatctagtaggtaaaatctaaggagtgcattcaattggtacttgatgcaaacatcaaagcacaattaaatcaatatatgcagctaattgagaatgacattgttctcaaagttagcgcaggcgaagatgacacttctaaggacatgctggctctcgttgatgagctggcttccatgtcatcgaaaatttcagttgaaaaagctgaattaaacagaacgccaagcttcagtgtcaatcgtgtcggagaagacactggcgtgactttcgccggtatccctctgggccacgaattcacatcattagtgttggcgctgctccaagtgagcggcagaccgcctaaggtggaccaaaaagtcattgatcaggtgaagaagatcagcggtgaataccacttcgaatcttatatcagcctgacatgccacaactgtcctgatgttgtacaagctttaaacatgatgagcgtgctgaacccgaacattacgcacacgatgattgacggtgcagcatacaaagcagaagttgaaagcaaaaacatcatggcagtgccgaccgtttacctgaatggcgaatccttcggaagcggccgtatgacgcttgaagaaatccttgcgaaaatgggcagcggcgcagatgcatctgagtttgctgacaaagagccgtttgacgttcttgttgtcggaggcggacctgctggtgcaagtgcagcgatctacactgcacgtaaaggcatccgcactggggttgtcgctgaacgcttcggcggacaggttctcgacaccatgagcatcgaaaacttcatcagcgtcaaagcgacggaaggaccgaagcttgcggcaagtcttgaagagcatgtgaaggaatatgatattgatgtcatgaaccttcagcgtgcgaaacgccttgagaagaaagatctgttcgaacttgaactcgaaaacggcgctgttctgaaaagtaaaacagtgatcctttcaacaggtgcacgctggcgcaatgtcaacgtacccggtgaacaagagttcaaaaacaaaggtgtcgcatactgcccgcactgtgatgggccattgtttgaaggcaaagacgttgcggtaatcggcggcggaaactctggtatcgaagcagcgattgatctagcaggtattgtgaatcatgttactgtgctagagttcgcgccggaactgaaagcagacgaagtcctgcaaaaacgtctctacagcctgcctaacgttactgtcgtgaaaaacgcacaaacaaaagaaatcacaggtgatcagagcgttaacggcatcacatatgtagaccgcgaaacaggcgaagaaaaacacgttgaacttcaaggtgtattcgtccaaatcggtctcgtgccaaacacagaatggttagaaggaacggttgaacgcaaccgcatgggcgaaatcattgtcgacaaacacggcgcaacaagcgtaccaggcttatttgctgccggcgactgcacagacagtgcgtacaaccaaattattatttctatgggatcaggtgcaactgccgccctcggcgcgtttgattacctaatccgtaactgataaaaaaatccgctatattgccagattggcaggatagcggatttttctttttctacagaaaaaacccgaaccaggcactccggtaaaagtgctcgattcgggccagcttcttataggtcctcgccattcgtttgaatgacatttttgtaccactcaaaggaatctttcttataccgcttcatggatccgtttccttcattgtcacgatcaacatagatcatgccgtagcgttttttcatttcgccagttgtgaaggagacaatatcaataatgccccacggcgtgtagccaattaaatcaacaccatcgtacgtgaccgctttttctaatgcttcaatatgcgattttaaatattgaatgcgttccggatcatgaaccttgccgtcctcctccagcgtatccactgcgccaaagccattttcaacgatgaataacgggatttggtaccgatcataaaaacgatttaacgtatatctcagcccggttggatcaatcgcccatccccagtcactcgaagtgatatacggattttcgacaccattcggcaagccgccattgacaatatcgccagtgttatcatttttcacatcgcttttcacagttgttgacatgtaatagctgaagcctaagtaatcgacggttccgtttcttaaaatctcatcatcgccgtcttcgaatgtgatgttgtagccttcgcgttcaaattccttcaacgcgtagcttggataataaccgcgaacctgtacatcagggaagaaatagcgctgcctcatttcttcttcagccagcatcacatcttcaggattggaggagaaaggataaatcggcacgtgtgataccatagccccgatctggaactctggattgatgtcttttccttttgccactgctaaggcgctcgccactagttcgtggtgtgccgtttgatacatgacctccttggcgttttcgttttcgccaaccacaacacctgaattcgtccataggaacaacggattgttcacatccatttggttgttgatctcgttaaatgtcatccagtactttactttatctttgtaacgggtaaagcaagcctctgcaaagttgacgaagaagtccacgactttccggtttctaaagccgccatattctcttgccaggtgcagcggcatttcaaagtgagacagggtaatgaccggctcgatcccatgcttcagcaattcatcaaacacatcatcataaaactgcaaaccagcttcgttcggttcagcctcatcgcctttcggaaaaatccggctccagccgatggacgtccgcagacattttaatcccatttccgcaaacaaagcgatatcttccttgtatctgtgatagaaatcaatggcttcatggttcggataaaactcgttctcttcaatcgtatccgtgatttttctcggcacgccatgtgcacctgctgtcatcacatcgacgacactcggccctttacctccttgattccatccgccttcaaattggtgggcagctaaagcaccgccccataaaaaatcctttggcatgtttcccatgtttaattcctcctcagcttacgactgtaaatattttttgatgcaatgcactttcctcaatctcttcaatgaaagctttaacaaactcatcgccttttttgacggtatcgccttcttttaccttcaaggaaaaaggcgtgccgtcaaatgtcaccgtatccagcccgatgtgcgcaagcaattcgacgccggacgctgaacgcagctttgtaggcgccaccatgacaaccgtaataacgccgggatggtggcatcgattttacgatatccttcgctttaggggtagaccgcttcagcaccaatcgaagtctggtagcgcagcgagaagccccaatcacattctcttccccgcctacggcctctaaaatgtcttttgctagtctcgtataatctctcacttccccgacatttcacccacccctttgatttggttgcgctttcattataattgtaccggtataatatatcaataccgaaacaaaatatttacgcactaactatcattgtaagcggtttatgctataattttggcagtgaaactaaacgaataaatgaggaatgcgtatgttaaaataccagcaaatcgcagcggaaattgaaacatatatagaagaacaccagcttcagcggggagacaaactgccagtcctagaaaccctcatggcccagtttgaagtcagcaaaagcacaatcacaaagtccctcgagctattagagcaaaaaggcgcgatctttcaggtcagaggaagcggcattttcgtcagaaaacataaacgaaaaggctatatcagccttctgtcgaatcagggatttaaaaaagacctcgaggatttcaacgtcacctcaaaagttatcgaactagacgtgagaaagccaactccggaagcggcggaaaacctgaacatcggaatggacgaggacatctactatgtcaaaagggtccgttacatcaatggccagaccctttgctacgaagagtcttactacaacaaatcgatcgtgacgtatttaaacaacgaaatcgtctcccactccatcttccattacatccgggaaggactggggttgaagattggtttttctgatttgtttctgcacgtgggccagcttaatgaggaagaagcggaatacttgggattagaggctggactgccgaagctgtatatagaaagtatttttcacctgacaaatgggcagccgtttgattactcgaagatttcgtataattataagcagtcgcagtttgtcgtacaggctaatagttttttgctgtagagctgcttcactatggaaggtggtcgacatgaacaaaatcatcattcctgcaatactagccatctttgcgctctggatattcttacagatttcactagagatgagcatcgttaagaatccaatgaactactttatcgtattcattatctttttcctctttgtaaagatggtgaaagaaaaacaataatagtttactttgaacaggaaaccagatttgacatctggtttttttgtgtttcactttattcatccgtttcaattgtctctaaaagcagttatgcggtactatcatataaaggtccaatgtttaaaaataatgtcatacttttaaattcaccttatcatgcacatgatcatatataggggtttattctaaaaaggggatggacgattttggaaagcaagtacctagatctactcgcgcaaaaatacgattgtgaagaaaaagtggtaacagaaatcattaatttgaaagcgatattgaacctgccaaagggcactgagcattttgtcagtgatttgcacggggagtatcaggcattccagcacgtgctgcgcaatggttcaggacgagtcaaagagaagatacgcgacatcttcagcggtgtcatttacgatagagaaatcgatgaattagcagcattggtctactatccggaagacaaactgaagttaatcaaacatgactttgatgcgaaagaagcgttaaacgagtggtataaagaaacgattcatcgaatgattaagctcgtttcatattgctcctccaagtatacccgctccaaattgcgcaaagcactgcctgcccagtttgcttatattacggaggagctgttatacaaaacagaacaagctggcaacaaggagcaatattactctgaaatcattgatcagatcattgagcttggccaagccgataagctgatcaccggtcttgcttacagcgttcagcgattggtggtcgaccatctgcatgtggtcggcgatatttacgaccgcggaccgcagccggatagaattatggaagaactgatcaactatcattctgtcgatattcagtggggaaatcacgatgtcctttggatcggcgcctattccggttccaaagtgtgcctggccaatattatccgcatctgtgcccgctacgacaacctggatattattgaggacgtgtacggcatcaacctgagaccgctgctgaatctggccgaaaaatattatgacgataatccagcgttccgtccaaaagcagacgaaaacaggccagaggatgagattaagcaaatcacaaaaatccatcaagcgattgcgatgatccaattcaagcttgagagtccgattatcaagagacggccgaactttaatatggaagagcggctgttattagagaaaatagattatgacaaaaacgaaatcacgctaaacggaaaaacatatcagctggaaaacacctgctttgcgacaatcaatccggagcagccagatcagctactagaagaagaagcagaagtcatagacaagctgctattctctgtccagcattccgaaaagctgggccgacatatgaattttatgatgaaaaaaggcagcctttatttaaaatataacggcaacctgttaattcatggctgtattccagttgatgaaaacggcaatatggaaacgatgatgattgaggataaagcctatgcgggtcgtgagctgctcgatgtatttgaacggttcttacgagaagcgtttgcccacccggaagaaaccgatgacctggcgacagatatggcctggtatttatggacaggcgagtactcctccctcttcggaaaacgcgccatgacgacatttgagcggtatttcatcaaagagaaggaaacgcataaagaaaagaaaaacccgtattattatttacgtgaagacgaggcaacctgccgaaacatcctggcagaattcggcctcaatccagatcatggccatatcatcaacggccatacacctgtaaaagaaatcgaaggagaagacccaatcaaagcaaacggaaaaatgatcgtcatcgacggcggcttctccaaagcctaccaatccacaacaggcatcgccggctacacactgctatacaactcctacggcatgcagctcgtcgcccataaacacttcaactccaaggcagaagtcctaagcaccggaaccgacgtcttaacggtcaaacgattagtggacaaagagctcgagcggaagaaagtgaaggaaacgaatgtgggtgaggaactgttgcaggaagttgcgattttggagagtttgcgggagtatcggtatatgaagtgagggatgtggggttcagggattatattctttgggcccatttttacaatcaactataaatcaacaaaaagcctctcaaaatagggttttgagaggctcactatcaaacatgaaaagtacttctattagtgttaggtcttatgacttgatctacattctcagcaatcgatttataattttgtttttttgataaacgatcataatccccaacaatataaaactctttttttgcccttgtaactgcaacattaattaaattaggctttgagcacgaccaatttgccgctccatcactattttgatctgtccccactacaaagtaaacagtgtcggcttcttttccttgaaaggtatgggtagttcctattgagcttcgagtccaatcatttactattttctttggtacatttaattctgctaaccgctttttaattgtttttctgagaccatctttcactgctgtaaagggagtaataacatataaatcaggagcatttaatgtattttcccatttttgataaatctcttcagcaactaaatctgcctgctcttttacaaactgcttattaaccgctactcccttacagtcaaaccattcgcttttcccttgtttttttatcgctaaaaccattttattatcataagcaatttgattagcgattgtaaacattggatttaagcatctcctatgaacccataaaggtatccctatccactgtcctttattgttatacattccaaatggattcgccgcatccgccagtgattgtacagaactccctatttcaataaaccgatcttcaataccataaaatttttttatatctcctaatattgttcgatcaatggtgacaactggttcaatctggattggatcaccaacaacgacaactttttgagacctccataatgcgcctgccgcttgttgcggagtagcttgtcccgcttcatctataaataagtaacgaataaaatcacgaccaactcctttatacattgttcgaacactggcaaaggttgtacttattacgggtgtgattaaatggattacaccccacatatgttgtaaccacattctgtgctcagtctgatttaaatctaacttacttcgataatttaacaaacgcaaacttgattttattgctttataattaaatatcaaaaacaatttgtggactttcattccctttaaaaaaagaagccctctttcaaaattcaattcatcagttagccaaggagtatgtaattgcctatattcatatgcactttgagaattggtccaataattatcatcgggtattactaacccctgatttttgcatttattgttgatagaatccctatatttctttaactccatccttatttgattcgatctcatctgcaaaagatcccattccttttcttcattttttattttcatagttattttttgcagttgatcttccatctgtaataatttgtttctttttgtatgaaatattctttgaaaaaaagttggtttagaaagcgtgtgaaactctctctctaacaaccgtttctgttgtttataatgagctgtctttaatactaacttttcttgttctgcctctagtaacaataactgattatttatatccttatattttttaaaaatttcgcataacgattgtagttctgctttcttttgtttaactgatttcaatgtttgttggaaatctgttactgcattcttccaatctgttaagcttatttttttattttctcgttctaattgctcgatgaatgatagttcaaattcgttattatttctataataaagttttttgtaatagtgagatatattttccgactttcctaaagatgctgagaatagtccccaagtatctgtctcttcacctagaagagcctttgccgcaaaaggaaacatcgataattcctctgcttctaatgcatatgctttttcataagaagaaaatacattttcatctgtaactttacgtataacttccttctttttaggaagatcttttgagatattttcaactgctccattattgcttgaagccactaccatagaatactgattaatagatttatcaatttcataaatagtataatgatagccatctaaaactaatttctttatttttttcagagctttttctgggttttcaaaacaagccattttttctgctttttcaaccatgagatttgcaaaaatatcttttaacagtgtcgttttccctgttcctggcgggccattcacagagcttatcttttgattgttatttataatttgatttacagctacttgctgcattaaggataatctatgttcaacaggtgacggccacctgccgttaggtacatttttaggctgcaacacatcttcaattaaaactctattttcatcaatgttcgttctattatcaaccccttcaataaattgccgtagtgtttcattttctccttgtgagataatatctcctaagtcctctaagaaaaagctatgaaaattatttacccgtccatcttgtccaaccttcaaaatttctttctcaaaataatgaagcgccatattatctattcgtaaaaaataccgttcatatactccaagtactttcttaagggctttttctgttactccatttacaaagatggcatcaacctgttcctcaaataatctcaactgatctcgaaatgtagtcatcaaatcatcatatggcacttcaagatgttcgtttattaatttcatcacatacataagtacaggtacaaatgcagaatcctttacatacttgcctgtatggtcaactaaaaaagacatactaaataacattttctgatctctattaatcatttcttcattattttggaatagatcacgtagatagctaacaagtttatgttgctcaaagcaacctaaatagtaacgaaattgaataaaatttttttcagagtccttcaactgatgcctctcccaaggcctttcagaaaaaagaacttgttctgttttctttcgttgttgaccatctaaaaaatggcttctactcaattcatctcctataccattgactccgcttggtgataaagcctcaactaagtgccatgcccttaatacagaatttacatttatcttccccataattccctcctatttttaacaacatcattcggttattgtcctcaattgatccaactggtatctgtaaaaaatccctaaactgattgatcagtctcttttctttttttcgacacatttgtttaaatattgaataattaactagatcacacattaaaattattagattttagaacatttcattttagtaaaaattcatgactgattcataaactctgagatcatttgttaaatttatgatacgatgacagtaaaaaagacataacaggggctagtcatatgagtgaacttgtgtttgaaaaaagagattttaatacagaacaaattcttgcgttgaaggcatctcgattagataacaatccgattgtatacattctttataacgaaaaaaagaagccgactgcatatattgggcagactgtgcaggctgcacgacgattgaaaaatcatttgagagacaagaagcgaataagtttaacgcgaaccattttcattggtcatgaaagatttcatcagtcagcttcctacaatattgagacaaatcttattaattactttattgccgaaaatcactaccaattgcaaaatgtcagtcagacaagatcgagagaaatgcatcattattatcaaaaagaattttataacgaacatctttttgaggaaatttggaatcagcttcggaaagagaatgttgtcagcgacacccttgaaaacctcagaaataaagatatttacaaactatctccgtataaagagctctctccccagcaggtggaaatcaaaaatgaaattcttgatttttgcaaggcgcatattgaaaaaccaggtaaccatgtcatttctatagaaggagatgccggaacagggaaaagtgtcttactgagctctctatttaacacgattcaggatttatctaaagatgaaaattcacatttaaaaaacaagaacaattacttacttgtgaaccatggtgaaatgctgaagacgtataaaagcatcgcaaacagcttaccaaatttaaagaaaaaaaacttaatgaagcctacctcctttataaatcaaatgtcaaaaacaggggaaacagctgatattgtattagtagatgaggctcatctgcttttaaccaaagaggatagatacaataatttccactatcgaaatcagctagaggaaatcattaaacgcagtagtatcactattgtcatcttcgatcctaaacaagtgttaaaaattaaaagctattggaatgaaaggttgcttgaggagatcaccaatcaatatcatgcgaaaacagtaaagctcacggagcaaatgagaatgaatgcaaatccagacacactaaagtggattaaccattttgtctcaaaacaattgctccctctgccgcaagaaaataatgataccttccaactcaaaatctttgaggaccatgccgactttaaagctgcaattgaaaaaaagaataatgaagtaggtctatcacgtattgtctcgacctttgactatatccataaaaaagatggtgctacttatatggtcgatgaggaaggcattaacatgccatggaattctacaaatgacaaatggacttgggcagaacatgcagattctattaaagaggttggttcaatctatactgttcaaggttttgacctaaattatgttggcgtcattctaggaccttctgtcagctataatagtgaaaaggatgagcttttcatcgacactgcaaaatataaagatacaggcgcattcaccaaacgagatgacatgtctgccgagaaaattaagaaaataaaggaagagattattctaaactctatcaacgtcctcatgaaaagaggcatcaacggtctttacatttacgcaacggatgtaaaattaagaaatagattgctagagttaaaaaggagaaggaaaaaatgagcgaaatcaaagatttaattaacacgattaatgaatttagagacgcacgcaactggagacaataccacaacccaaaggatcttgccatctctatttcaattgaagcggccgagctgttagaagacttccaatggaaaagcagcgaagaagcactcaaagcaaacgaggaaaacattcgtgaagaaattgctgatgttcttatctattcgctgatgctttgttcagatcttaagatggatgtgaaagagattattgaggagaaggttgtgaagaacggtcggaagtatccggttcaagggtaattatatttcttacaataattaaagcaatcttcactcctcaaaaaataaaagtgcatgacgatatatttttggaatgattaacaaatagattgattcttctgaatatattgtagctcaacttaccgctgagtgacagaaattaatcatagatactgagtttaaaatttactttggatttactaatgtaaattattaaacttaggattttattaaaacaggcatattcaagtatgcctgtttactactttaagaaagaagtaacctcattcacttatggtaaggctctccgtagtgtatctacttttgttctagttcttttaaaacctttaagtcttcataataccttaacaccgtactttgcattactaactttctattggcagaatctctaatgttacgaaatttctcattataaaacagagtaaaatcatgtattgtgctaaataaggttatgttagcttgtacccattctgataatgtctcatcagaaaaaggtaagtcatttgattcaaaaaataaactatccaacactgacgaataaggtgttacacttgcaaataactcatcttcaaaaatagtctcattttgatactcattaaataatgaaattatagattcagcatatgttatcatttgatacctaatttctttaactttatatagtacttcatcgttaggcttggtattatcaaaaataaaattactaattatcttatattggggataaaactcaaaatgaacaccttttattaaatgtttattagagcctttcaaactataccaataagtcttatcttgattatcgcttacccaagtagttttacaataataatttcctcgtaaaatatcactttcataaaaagtgaaataaatccatattatatctgatggacagcctttatatctatcttcttgtattttgttattatatacatcgcaaaacagtaatctttttttaatttttgttgagacgtctgctatttctgcatccgagaatggtttcttaagaagtatttttgccgcgtacctttttttagaaccatgatggacaggttccacactcttaatgatgtaatcctcgttttcaaggtaaatattatcttttttataaggagtatactctgaaattttaaaataaattgtacctcctatattagctctatatatagcatgctgaggtgtatccggattatttaaagtatgaatctcaagtaacctctttacccacaactgcaaatcataaagtgaaatttctcccttttttattaaaaatttattcgtcagtccatcgcataaaatatttgtaaatatacttccattgctccctccataagaaggttcaatagcgttactaccacttaatatcgcataaccgctaccttgaaaagattctatagattcttctaaattagtgctttttgtaccttcaactctaaaattacctgaatagcagcagtctataagcaatactttgcttttagctaatgactcgcctattttattaattatgtcctgagtacataataaaccatcgctaaaaacaatattatgaatttcactagaagtcccatgacctgagaaataaaaaataaatatatcatctttttgtaaattgccaataaaaagctcaagggcatgtacaaaatcgacgattgctacatgaccgttatttgtcatacccatttgaaaaatatccatatcatccagctgtaatccttctcttaacgctttattaacattaattatgtctgttttacaaaatggtaaatcaggtgcaccgatacctgaataatcactaactcctactataaatgcctttatccttcccatataaatcaccccagcttcacttgtttatctgattaagattgtaataatcatataaatagacaagcccaatttttattaaagaaaattgggcttgtctatattattctggttgttctaatcgtgattgaatgtttttccagtgtttcttcacttgtgtttccataagatttatagtttttgaatcttcatcaaatatcttctgtgctctttcaacgtaactaataaaattcccatgccctttcttactttttcccaagtgagagtagttcttatataattctctcctatacgatttacgaccgaatttttttgatttacgattgcatatccttactttacgatatgctctcgtataatacttaaaaagacttttttctctaattcgaacttctttaccattaaaactgaaccctagatagtctaatattgtctcatttaagtctaaatcgataatctgattatcgttataaaaataattccctgtcttctcaagttgaatttctaaatttggaatctgttcttttatatcttccaaaattttttgatgaatttgatagttatagtcttgaatgcctccttcaataggaataactataattaaatcatcacaatatcttctatatagcccattttgttctttaacatatttttgtatttttttatcaaagtccagcaaataaatattagaacagactgaactgatacccgctccttgaggaattccataccttttagaattcttgtaaatatttttatgcttaaatgctctaaattccttctctgtgaaatatttataactactttcaatttcactttcagtgtattttgtctttaattctgcttctatagtatctttaataaagtaactaaatcttgttatattcttgaagacattataataatcgtcaggtaaggtatccttttttagaacatagcggattttctctttaagatacctatgatccaatgtatcaaagaaattagtaaagtcagcaacaaaaatatatgcactttgctgcacttttataaaatcaataacttctttagcgaagttaatattactttttccagataagttattccgatatgcagttgcaacttcattaatacctagttcatctacaacagaattatagtggttatttagcttgtccccatagtacttatagatatagctatccatatgagacgcatagaaaattttacgaactttttcttttcgctttttttcttttctgctatatttttgaaatttaatttcaaaatgcataaacgggtaaaaaccatgtttagcaacccatcgagggttctggattttactcttaactttttcaattgattttttattatcaaggtgcttataaccctttacacgatactttttttcattcatatttggcagagctagcaggggtatgtaatcgtagcctattactctctatcaaaaaccctgctagcatactctcctttcgaattatagaccattgctagcctataaagaggctactgaatgcactaatagcttatactataatcagtatattaaattggttgtttatgacgattggaggtatccaaatgccaagttattcagaagcgttatcgattgtaatcgactggataagtattatgattacaattgagataaagcttgacagaaattcaccaatttccctcataactacttttatgaggcgttaaccatattaatattaccatctaaaatttaaatagtcaaaaaagtcaatcaaaagtcatgttttgacctaagatctgaaattaggtatcttgaaaaatataaaatatattatgtaaatatatgagttttttatttttagaagtcgatgatcttcaactgatttgggattcaattaatgatactcaactagttttccacccaatataggcatcaaccggatcgattgattatctgaaattagaacattttacgtaggaaaaagaagtttctttaattcttgatagaaacctttttagtagtttattgtctcttgctaaaaatggtgatctaaaagacactacggaaaaaagaatgattgcttttttaatgttatgggctcaattgaatggaggttccaatcagtgctggattagcaataatggaaaatgcatcaagatacaacgattcttgcaatgctaaaatagagctaaataattttaatgatattttcgatttttatccacctcagatttggttaaatttagctcgtggcacaatagaccagattccaaagtgtaactttttcaatattccatatgaaaactcaatcacttatcatgacactaatgatcacttcctaatgaattatgccagcatgttgcatttagttaatatatatcgagactctgacatggctcctttagaaaaattattagaagtcctaagttggaactttgacaatttactcatctctcaatatatcaatagatatcttgttatgttattttccaatcaaaatggtatcaaagcacctaaacacgctaatagcgatttattagaaagaattgaaaaaggttgtatgaatcaagcatgggatttaacctatctatcatgttggagtacactttactggaatgaatcaaaaacgcatgaggtttttttatttgctaccgccgataatctgttaaagaaaatttttattaacacacataatggtagagatttatttaatttaattaatattgcttttcctaaaagaagtgctgataaaatcattcaattctatattgaaaaaacaagaaacagaattttggggataatccaactcaatatttcaaatctttaattgagaaagaaaaaaagcatttgaaacaatctgtgggttgataattttcagctgtattacctaatgtcattccctttgttgtaaattcaaatatacaatacaaactttaatataaccaaaacagtccctcccccatttgttggggaagggactgttttggtatacaggtaaaatctcatctacttatgatacggctccccacgattaatccgaaaagcccgataaatctgctcaactagtatgagacgcatcaactgatgaggaaacgtcatttttgagaacgacagcttctcgtccgctcgcttcatcaccgcgtcgctcaatccgagtgatccgccgatgacgaaggtgactttgctttttccatatgtagccagcttatctattgtatcggctagttcttcggatgttttcatttttccttcgatggcgagggcgatgacgtggacgtcggggctgattttggataggatgcggtcgccttctttgtcttttatgattttcatgtcctggtcgcttaggttttccggcgctttttcgtccgggagttcgatgatgtcgatttttgcgtaggccgaaagtcgtttggtgtattcttcaatgccttgcttgaggtatttttcttttagttttccgattgtcacaatattgatattcacaggtcatccccactttaaaaacaagttattcatatatgttgtccacaattgtggatatcttttctgtattttgtgtaagatcattcgttccccactatatatactgcggggtctccacataattcacaggctgtggataaactgttagtatgttcgatttttctgatttcgggcggcagctcgtggtcgtctatgtacatatccagcaccgtttcgatgtgttcttcacaagaataatacgcttgtttcatgttcaaatcctccgatgttttcttccatttttacaaatgttctcttctcaatataacctatttattcacatgttagtagtgcttcgggctgagttttatccacaattcgacaaacaagctgttgatgactctatttcgctcgtgtgttagtttggatgtaaccgatgtgtgaggaggtctacatttgcgctttagatgggtttggctttttgtgatcatgttgctgcttgctgggtgtcagccgtcttattgggtgttggagaaggatcgaatcggtgaaggcagtccagacttagaaatatacgctaattaccttcaaatgcatgatgatgtaaaaggatatcaagtcttcaccatatcagaaggcaaaaaaatggtcgtcgtgtctctcggaagcagcgagaacgaaaaacagcttgaggtgtcagacgtcaaattctcacctaaagaaacgattgtaactgtgaaacgaaaacctgcttccaaagctaatgagaaaaacccttatattctgattggactcgataaaatcgaaggggatttaattgtccaagacgaaacaggatatcactttgaagaaacagattaccagcaataaagccggcgttctgagaacgtccggctttttcttttacttcaatgtcccatgcgggtcgatgacgaattttttggctgcgcctttgtcgaagtcgctgtagccttttggcgcgtcgtccagagaaatgacggtggcgttgacggcttttgcgatttgcgctctgccgctcaggattgctttcatcaaattgcggttgtatgtcatggcgggtgtttgtcctgtgacgaaggtatgggctttagcccagccgagtccgaagcggatttttagtgagcctgttttagcgtcggcatcctttgcaccgggatcttcggtcacgtataagcctggaatgccaaggctgcctccgacctgggtgacatccatgatcgagttcagcacggcggcgggcgcttctccttgattgccgtgcccagatgcttcaaagccaacacagtccactgcggcatcaacggttggttcacctagtatttgttcaatttgttcgccaaggcggtcgtgtttttgcacgttgaccgtttcacagccgaagcttctcgcctgtgccagtctgtcttcgttcagatcgccgacaatcacggtggaggcgcctaggagctgagcggagtgtgcagctgccaagccgacaggccccgctcccgcgatgtaaacggttgaacctgtttgcacgccagctgtgtaagctccatggaagcctgtcgggaaaatgtcggacagcatggtcaaatcgagaatcttttctagcgcctgttctttatcagggaatactaaaagctgaaaatcagcgtacggcaccatgacgtattcagactggccgccgacccagccgcccatatcgacgtagccgtaagccgatcccggccggtccggattgacattcaggcacacatgcgttttctgcgttttgcacatcacacagcgtccgcaggcaatattgaaaggaacggatacgatatcgccctttttgataaattcaacatcacgccccgtttcaatgacttctcccgtaatttcatgcccaagcaccaagccttctggcgccgttgtgcggcctctgaccatatgctggtcgcttccgcaaatgttggttgtaatgactttgagaataaccccatgctcacattttcgattcacattcgcctttgggacgccgggcccgtccctcaagattaactccggataaccgatatcctccaccgctacagtccctttgcctttgtacacaaccgctttgtttcctgtcaacgccattcctccctttcatgtgtttggacgcttggtccttgaacatgacttcggtttggcatgaccctttccctttctcacgactgttttttctgtattcttataacaacaaatatgccaagaaagcagccaataatggttccgccgatgtctaagaagtcgactttacatccatttaacaggaatacagtaatggccgaaaccaggctgatcataactgccagaagaataacccgtttggtgcgcatgtaattcctcctttagattcgtttctaaaccatacccaaaatcctctgcaaatttcggttcaacaaaaaaagagacttcacaccagtctcttcataattagagatcaattaaaaaatttcctgagaaataatgtgacaatactggttaccaacgcaatcgccgtatacataacaacccaaaacatgaatgagctattacccgaagctaacgtaaataacaatatcaagctcgcgataaggacgatgagcggtgccacccaaaatcttttaaataaaaaatgaccggctataccaaatacacctgcaatgatcggaaaaccaaaaacgataaataaaacggcgatagctcccatactaacctccttgccctaaaaccccttcatcacctcaacatcatacagcttcaaatgactcttcggcgtcacgacatcctttaccttcccaatctctttttctttcattttctttccggttttcagactgtactgttcaatgtaggcaggcttgttatacgtgtatgtgaagtaatagaggctgctgcctttttgggtgatttctttgaaatcggctttcattttgtcctgggaaagggtgaaggcgatgtttgtttttcctgtcttggcatcgattttgtgtacctttccgaagccgtcaatgaaatacaggttcccgtcataagggaaaaagctgtttttaaagctgaagggcatggagctgtatatcgtttgttcgtcgtttttgtattcggcgatgtcgtgcagctctactttgccgctttttttgttgatcttgaccatttgatagagattgcgggctttttggccgcgaaccataacataaacagcttggtcgtccacagcaagctgggattcgactgaggctccttcccggtactgccattccgatatcttgtggtaagtgagcttcttttgatctgcttgaatctgaaggagctcatagcctttttcgtcagctgtcgggacaagtgcgtaaatggcgccatcatggaaaccggaggctcggatgtagtaggggatgacgtcttttttccactctccgtctatttggcggtacagctctgagcggtatccgtctttctttttgtcgtagccggagttgtataaggtgtaaaagccgtccgtgttttgcagaaagcctgcgctgtcgcctgtgtgctgataggttcttttatgagatctcaggccgtctttaatcgtataaatcttgtttttgtcctccagcatcacactgtcgccgtgaaccttggctgatcccagctcaaggcccttcatctgaaatgaagacagcgacccgtcctggctgataaacaaggcatagcttttcccaccgccaaatgcatcttgatccgcagaggttgaaaaatataacaggacttctttgtcatccaagaaaccggagtctcgaagatcctggtgacttacagttttatggctaggagaaatgaagacaaatagtgcgattcctgcgagaatcagcatggcgatggtaatcatccactttttcatatccttctccttagtaaatggtcatgatggttgtcgtatacgaagaacttgtgatgtcgcgcggatacacgcctaagcctccgttgctgtctatatcaatccctgcttttagcaaaaaggcagaccataggagctttgaacagtttttggcgccgtcatggcccgtatttctgttattgacgaagttaaatgagtatgggtcgccgacttttgataccgcccagtcggcagcagctgttttttgagatgaggatacgctgacggtttgcacaatggagttgtcttccacgtctctggcattatacgcgatctgcctgacgccgtcgctcgggacagattcaacaattttgtcagcggcggagtacatgccgacgtggccatgattgtagtaggctgtgtaggagttcgtgtaatagatattgcctttcgcgcttgtcgggagttttttcgtgccggacgacccgcccatgatagacatgccgctttccttggcgagccggtctccttctgctttatcagccgtgatttccttatagaactgttttaggataacgtcctgctttacgtgctgctgtttggcaatctggctggcagatttcatgatttcttccggtgtcgtgcctggctgcagtgcggcgatttcttcagcataatttgtgttctttacggctttggcgggagaaacgaacaggccgccacacattgtaagcgctaccaaaaacatcgacactcgtttcttcaacttcattacatctcctcttttcttgtgagtgtaggaaagggaatttcctcacccacattatattaggaaaataaggaaagtaactaggttatttacagaatttttagaaatcgtttacagaaaaaggcctttatcaggcccttttcgttaaatcttcttgctcatcactacgtctgtttcttgaaatccggtttgctcatatagctttcgcgccgtctgattatgggcaaagacatgaagggacagcttgcggattcccatgctgcgtgccgtttgatctaatgccgccaatgcttgctttgcgtagccctttccccgatacggttcatataacccgaaatcataaataaacgcttcctgctgcggatgctccggttcagcatgtatccagagccagccaacgatatccttttcattcagcttgaggctccacaaatggtgatggggtgtttccagccctctcggaagcagatcagtaaacgcctgcttagacaaaagctgtgcatcttcaggcagccatgttcccgcttttaccttttcttccgcgtaatgctttgttgtgtacgtgagataagaccgaaattcttctgtctgcattggggtcagcatgattgtcatatcatctctccttcatatattgactagaggattttacataaaatagaaagaggtgttactatcagaataagcaactgagattgataagtcactagagaaaggagtttcacatgaataagatcgcacccgcagaaatcgctagcatgctcaacgattggtaccttgccatcaagaaacatgaagttgaagaatcctcccgtttatttgaagaagtgaagcctttattggacgacatggaagaggatcaggaggtgctggcctacttctccttattggaactgcgccacaaggttttgcttcacgaggcgagaggacagggctttcagcatgaggagccttctcatatgaatgctacgtctgacatgctgaaatattacttttttctgtttgaaggcatgtatgaggcctataaaaataattatgacattgccattgggctgtataaagatgcagagcagtatctcgacaacattcccgatccgattgaaaaagccgaatttcacctgaaggtcggaaagctctattataagctgggacaaaatattgtatccctcaatcatacacggcaagcggtcaaaacgttcagggaagaaactgattataaaaagaagctggcttcagccctgattaccatgtcaggcaattttacagagatgagccagtttgaagaagctgaggcttacttggacgaagcaattcggatcacgagtgaattagaggatcatttttttgaagcccagcttttgcataacttcggccttcttcatgcgcaaagcggcaaatcagaagaagcggtttcgaaattagaagaggccttacagaacgaagagtatgcccgctccgcctattattatcattctgcctacctgctgatacgagagctgtttaagatcaaaaagaaagaacaggccttatcttattaccaagacgtgaaggaaaaattgactgctgagccgaatagaatatgtgaggcaaaaatagacattttatatgccatttatgcagaaggaggtcatgcggaaacgtttcacttatgcaaacaacatatggatgacttgttgtccgagaaagagtatgacagtgtaagagaactttccattttggctggcgaacggtatagggaacttgagctttacaaagaagctgcccactttttttatgaagcattacagattgaagaactgattaaacgaacggaggttatataaatgaaaagatttctgattggcgcaggcgtcgcagcggtaattttatcaggttggtttattgcagaccatcaaacccattcacaggaaatgaaagtcgctgagaaaatgattggataaatgaaaaacccccgcgggtgcgggggttcaatttaacgaaagaatcctaaaacggtttgtagttttaggattctttcatcttttcagcgtgattgaaaacccttgaagtctaggaagaacgagcattggagcgcagcgaatgtttggaattcgtgagcaccgaagcgcaggcctgacaacgaatgcgagggtttgtcgacacgctgaaacccccgcgggtgcgggggttttcttattacagcagcttcttccctagcagagattctacgagctctactgctgttttacccgttttgtttttgtgatcaaggatcgggttaacctcaacgaattcggctgaggtaatgatgcctgcgtcatacagcatttccatagccaaatggctctcccggtagctgatgccgccgacgacaggggttccgacacccggtgcgtcgttcggatcaagtccgtccagatcaaggctcagatggacgccatcacatgctgataaataatcaagggtttcttcaatgacctttgtcatgccaagacggtcgatttcgtgcattgtgtacaccttcatgccgctttccttaatgtacttgcgctccccttcatcaagtgaccgggcgccaatgatgacgacgttttccggtttgattttaggcgcgtagccttcaaggttaaccagtgactcgtggccaatgccgaggctgaccgcgagcggcatgccgtgaatattgcccgatggtgaagtttcaagtgtattcaaatcgccgtgcgcgtcataccagatgacgccgagattatcgtaatgcttcgctgtgcctgcaagcgtgccgatcgcaatactgtggtcaccgcccaggacaagcgggaattttttctcttcaatgactttgttgaccttttgcgcgagtttttcatttcccgccaaaacggaattcaggtttttcagttcctcgtcatttttgattttttcgcggttgatcggaatgtcaccgagatcctcaaccgtataccccatgtctgacagccgctcgatcagatgagcgtaccggatggcactcgggcccatatctactccgcgtcgtgcttgtcctaaatccattggcattccaataaccgaaatcgttttatccatctgtgattccacctcaacatttaagataatgtcctatgcgggttctaacaaagatgacttacggacaacgttttaaagctctagctgacgattcgcctgctggcgttttttaatgacgacatgataaatgatgtagcaaatgatcataaacggtacgccgcaatacagcgcgatacgctgctccggatcaaatgcgagactgatgagcacgaccgtatttaacgttagaccgatcagcggaagcaccgggtacagcggtgttttaaatttcaaatcttctatcttcccgccttcgcggatatatttgcgtctgaacatgatttgggaaagcgaaatcgtaatccagccgacctgtgcgctcatacccgccaaagataacagtaccatatagacagtttcagcctgcgcaaactttgtcagaagtgataggcaggccacagccatcgttacgattaacgagtacatcggtacaccgcgctgatttgtttttccgagcgctttgaaggcctgtccttcattggccattgcgtacagaatacgcgttgatgcgtataaacctgagttcgcaacagataacagtgcgattaaaataacaaagttcatgatatcagctgcatatgggattccgatttgctcaaatacggcaacaaatggactttccacgacacccgcctgtttccacggaatcatgccggcaatgacaatgattgaaagcacaaagaagacaagcgttctccatactgtctgtttgattgaccgtggaatcgttttttcagggtcttcactttctccggctgcaaccccgatcagctcagtcccctgaaacgcaaagttcacagtaatcatcgtaatcagcattgcctttatgccgttcggaaataacccgtcttcataaaaatgtgtcaaaaacggcgcctgctctccgcccttcagatcaatcaggccaaacatggcagctccgccgagaataataaataaaaggataatcaaaattttaatgcctgaaaaccagaattctgattctgcaaaggcttttgtggtgattgcatttaaaataaacatcagtgccgcaaagaccagacaccaaatccacacgtctatatgcggaaaccagcgttgcatcagctgccccgctgataaaaattcaatggcgcatgtaaccgcccagccgagccagtacagccagccgaacgcaaacccgaaggccgggctgataaattttgtcgcataggtctggaaggatcccgacacaggaaaggcgactgccagctctcctaagcagagcatcgtcaaaaacatgataaagccgcccactaaataggacagaaccgcgccgagcggtcccgcttggttaatggtaaacccggttccaaggaagaaaccggttccgatcactccgcccaatgaaatcatgaacaagtggcgcgatttcattgtccgctggagctgatttccgttatcttggtttgtattcacattctgcaccccttcagcaacttgtattggatctaagctggaacatctgcatggtgctatcccagtttgctgtccaaagagcctctatctatttaatataaaattcacttcttctcataaagatacattatactaaaatactgtagctgagcaaatagggagtgctgatttttctgttgtaaatttatacaaacgaagtgaatatcccgccatggtgcggatttatgcgttttgcagcacgtgcttaattttctctatcgcccaatccaaatcctctttggaaatgattaatggcggtgcaaaacgaatgactgtatcatgcgtttccttgcataaaagcccttcttccttcaaacgctcacaatacggacgtgccgcttcagtcaattccacaccgataaacagccctctgccgcgaacttctttaataaccgggttgtcaatgctctcaagctcgcttttaaagtattcgccaagctcaagagaacgatccgccagcttttcatcctccagcacttctaatgaagcgatagacactgcacatgcaagcgggtttccgccaaatgttgagccgtgtgagccagggttaaacacgcctaggatctcgcggtccgccgcaatgcatgagatcgggaacacaccgccgccaagcgctttgcccaagatatacatatccggaacaatgccgtcccagtcacaggcaaatgtcttgcctgtacgtccgagacccgtttgaatttcatccgcaataaacaagacattctcttccttacaaatcgccgccgcttcctgtaaaaatccttccggcggaatcacaatgcccgcttcgccttgaatcggttcaaacaagaatgccgctgtattcggcgtaatggcctgtcgaagcgcttccacatcgccgtaaggaatgagtttgattcccggaagcatcgggccgaatcctcgtttatattcctcttcagaagagagagataccgccagcatcgtgcggccgtggaagttcccgacacatgcgataatttccgcttgattgtcagctacgcccttcacttcatacgcccagcgtctcgccgctttcaccgcagattcaaccgcttcggctcctgtattcatcggcagaatcatctctttgcctgtcagtttggctgttttttcgtaaaacggcccaagctgatcgttatgaaacgcgcgtgacgtgagggtgattttatcagcctgatcctttaatgcctgaatgattttcgggtgtctgtgcccctggtttaccgcagaataagcactcagcatatccatatattcattgccttccgggtcctttacccaagcacccagcgcttcagaaataacaatcgggagcggatgataattgttggctccgtaatgagacgtctgatcaataatttctttggatttagataaagctggcatatttgaattcccccttgttttctgtttcaacatgttatcctgctttccctttatataaatgcaagttctgtgccaaatcaagaattcgtgtgttttctacaattttcgaggacaaggtgcaaaaacattctgatatttcgagcaaaaatttcagcaagtgcaaaattcttttgcataccctctccatttttttataaaatagaagcaatattaagaaaactgagggaggttcatacagtggtcaaagacagcgaattcctcacattggtttttcagagcattttagatgaaatcgatgttggcctgcacgtggtagacgagcatggaaacacaatcgtatataacaataaaatgatgcagattgaagatatggagaagcatgacgtcttgaataaaaacctgatggatgtgtttatgttttcaaagcagcaggacagcacactggtacaggctcttcaggaaggaaagacgattaaaaacgtcaaacagagctatttcaataataaaggccaggaaattacgacgatcaatcatacatatcccatcgtccaagacggcaaaatcaggggcgccgttgaaattgccaaggatgtgacaaagcttgaacggctgatcagggagaatatgaacaaaaaaggcagcacaacctatacgtttgacagtattctcggcaccagtccggccattcaagacgtcatcgaaaacgccaagcgggcaacccgtacgtcatcatctgtccttctcgcaggcgaaaccggcacaggaaaagaactgttcgcgcaaagtatccataatggaagcgatcgttctggcggcccgtttatttcgcaaaactgtgcggcattgccagacagccttgtggaaagcattttgtttgggacgaaaaaaggcgcgtttaccggcgctgtcgaccagcccggcctgtttgaacaagcccacggcgggacgctgctgttagatgaaatcaactcgctgaatctcagccttcaggcgaagctgctgcgcgcccttcaagaacggaaaatcaggcgcatcggttcgacaaaggatacaccgattgacgtacgtattattgccacgatgaatgaagacccaattgatgcaattgcaggcgaacgaatgcggaaggacttgtattacaggctgagtgtcgtcacactgatcatcccgccgctacgggagcgaaaagaagacattttgcttctcgcgtcggagttcatccagaaaaacaaccatctgttccaaatgaatgttgaacacatcagcgatgacgtgaagcaatttttcctttcttatgactggccgggaaatattcgcgagcttgagcatatgatcgaaggcgcaatgaatttcatgacggacgagcaaacgattacggcttcccatctgccctatcaataccgaatgaaaatcaagccggctgacattccagagcctgaaacaccaagacaccagccggccgcggacttaaaagaaaaaatggaaagcttcgaaaaatatgtgatagagaatgtgttaagaaaacacggccataacatctcgaaagctgctcaggagcttggcatcagcagacaaagcctccaatatcggctgaagaaattttctcactcgtctaacgaataatccggagcaggaagcctgatcagaaaaacagtgcctctgccgatttcacttttcacttcaatcgtcccattgtgattgtcgataatcgatttcgttatggcaaggcctaatcccgaacctccatatttccgggagcgggatgggtctgccctgtaaaatcggttaaataaatgcggcaaatgctccggcgcgatgcctgtgccattgtctgctatcatcagcatcacgccggaactgcctttttgcagagaaatagtgatggcaccggttctctcatttgtatactgcaccgcgttataaaccaaattcagaatgacctgtttcatcttatcccggtcaaacaccgctttagcatcatcctcaagcagcagctgcagccttctttcttttgcaagcagactgagctgcggctccatttcccttatgagcgcatcgagatttcctctcttcatttcaaagctcggcacccgatcaatttttgctaaaaacaacagatcctctatcagccgagtggctctcttcgactcttcatacatactattcagcgccctatctctctgctccggctgaagcgcggcgccacgcagcagcacttcgataaagccgtgtatggacgttaaaggcgttctcaattcatgtgaagcgtctgatacaaattgccggatgcgctccttcgcctctttttctgctttaaatgacgtttcaatccgctccagcatgcgattaaacgaaatagcgagcgtgtcgatttccatttgttttcgatatacaggaagccttttattcaaatttcctgcattgatttctcccatcatatgtaccatttgtgataacggtttaagcgtatgtctgaccacaggcaagaacgtgaaaagcccgagcaggagcgcaaccagcgagagcgtggaataaatgctgatttgccggagcagtacgtccttcagtggttctgttaaagtactcatttggatcacgcctgcttcttttccatcaatagtaatagcctgaaacacaatcagcacttcctcgccggattcatttttcgtgattttgtaatgcaaggccatcgtatcttttaatgcctcatcatatacactttttttcactgttggcggtgctcccgcatatggatcggtcgacaataccgtactgtcttttgttttcttatcgataaaaacaatggtcacgcccggatagataaaggcgggacggacagcaccatctgacttttccgagctgtcgggatggcttttgtatgttttaatattattccagatggttggctccgttgagttgatataactttgaatgctgacagctcggttttcatataagaggcgttttccaaacacatattgcatagcgccgacaaacaccaatagaagaacgagaatgcataatgaacggaataaaagctgaaagcgcagtgttttgaatcgttttttcattcaatatccacccgatagcccgcaccccgaaccgttcggatcacttcatgctttttgtcattcaatttttcccgcaaggaacgaatgtacacttcaacaatattctcttctccgtaaaaatcatacccccatactttatccagaatccttgctttactgagcacaaggccgtgattcagcaccaaaaactttaaaagctcgtattctgttgctgaaagcttgagcacctcttcctgatagcggatttctctgcgccgatcatcaattcgaaacggaccgagcgcgaattcttcaaacaggttgggaaagtgatcccgaattctcgcatagattcgcgccagcagctcttcaaagctgaagggtttgatcatataatcatcagcgccctctgtcagcgcttttacccgaacccccacctcatccttggccgtaagcataataaccgcggtatggccggtttttttcatcatcctcgatacttccagtccatccattccgggcatcatcacatccaagatggccacatgcggctgaaatgtctttacggtgttcatcgctgtcattccgtcagctgctgtcttcacttcaaagccttcattttcaagacccattgtcaaaaaatctaatatcgccggttcatcgtccacgagcaaaatcttgatgcctttcatcctattcatgctgtgctctctccttagttggcataaacctctgattagttttttcccttcccctcctattattcgtttttacctgaaaacaaactgaatcttccctaaaaatcagctgaattcagcaagttttcagccagccctcatttgattttcagcttcggcctatacaattgccttagttggtacagccaacaatgaaataaaggaggaatctcacatgaatatcactaaagttttatcaggagctgcactgggaacgattatttcaatcagttctttcacttctgctcacgccgctgtcattcaaaaggatgatacatcaacgaaggttgagacgaagcaacaggcttccatcacaatagcaaaggcaaaacaggttgctttgaacaaatgcaaaggtactgttcaatcagcccaaatgaagaaagtgaatggcacatacgtatatgttgtgaaagttctcggtgaggacgacaaacagcatacgatgaacgtcaactgcaacagcggcaaagttgtgaaacatgatgttcaaaagaaacaaagctatatcagcaaaacaaaagcccaatcgatcgctttgaaaaactgcaaaggtgcggttcaatcttctgagctgaagcaagaaaacggtgtttacgtttacgtcgtaaaagtaatgggtgaagacggaagccttcacacgttccatatcaatggagaaaacagcaaagtcgcaaaacacgagcaaaagaagcaagcacatctttctaaaacaaaagcgcatcaaatcgcactcaacaaatgcaaaggcgcagttcaatcttctgaactgaagaaagaaaacggcgcatacatctacgttgtcaaagtgcttggcgaagatggaagcactcatataatccatgtcaactgtgacagtggtaaaatcgtaaaacaagaagtgcaaaagaaaaacgcagccgttacaaaaacaaaagcacatcaaattgcactaaataaatgcaaaggcacagtgaaatctactgatttgaagaaagaaaacggcacattcgtttacgtgattaaaatcactgcccaaaaccacactgaacaaacagtgaaagtgaatgctgaaaacggaagcatttgcaaataaaataaactgcctgccagcagtaaaataactgaaattcaacgtataacaccagtcttgttttaacacaaagttctaagttcatgtctacctttttctaaatactcttttaaactgaacgtgcgtgacccgcgttcagttctttttctaaggaggacctacaaatgaatatgaaaatatgttctgcagctgctttaggagcgatcatttcaatcagttctttatcatccgcacacgcggctgttctgcataaagaagacactgctaaagttcaaacccagcagcaggcttctattacgctctctaaagcaaaaactgtcgctttaaagaactgcaaaggcgcagttcaatcagcacaaatgaagaaagcagatggcgtttatgtctatgtcattaaagtgcttggtgaggatggcaaaattcacacctttaacattaaccgcaacagcggaaaaatcgtcaagcatcacgttgaacataaacaagccgcgatcacaaaagcaaaagcacaaagcattgcgttgaacaaatgcaaaggtactgtcacatcttctgcattaaagaaagaaaatggcacctatgtgtacatcatcaccatcacagccagcaaccacacggtacaaaccattaaagtgaatgctgagaatggaggtatttgcagttaacagccatttgctgctgtttcacgtgtaacatccatcttgtatttttcttcatattcgatatatccttttcaactgaacgggcgtgacccccgttcagtttttttgcatatcaaaacagcctggcaaacgatgccagactgttttgattaacttcctaattggtctgcggaggacagcttgatgtctacagatttttcttttccgccgcggtaaaacttcaccttcacccggtcaccgacttttttctgataaagccgttttcgcaggtcaacaatatcatttactttgtatccgtcaaatcccgtgatgacatccagttccttcagccccgcttttccggcaggtgaaaaggcgtctacacccatcacaaccgctccattggtaacatgcttaggaagctttaatgtttcatcccaatgatagcttgcgatgtcgcttagcgatttcatctcaatcccaaggaacgggcgtttgacctttccgtatctctctaaatcctctatcacagggatcacgagcttagatggaatcgacaggccaatcccttcaaccgccgactcggcaattttcattgaattgatgccaatgaccttcccatccatatttaacaaagcaccgccgctgttcccagggttaatggccgcatctgtttgcaggacttctgcgttccagtcaggctgtccatcaccgtttgaatctactgggatcgccctctccgtacccgagatgacgccttgtgtgacagagccagcaaactcaaggcctaacgggttcccgatcgcaataaccggctccccagacttcactttatctgaatttccgaaatcggcgactgctttaattttatcgcttttcacccgtaaaacggccagatccatcagctggtcgctgccgacaagatcagctgatacacgtgagccgtctttcaagctgatttcaatttgggaagcgccttcgatgacatgatggttggtcacgacataagcggaatggtcatttttcttatagatgacgccagagccgctcccagcctcgccgctctctccccgtatatctgatttttggatgttcacaacaccgacaacggcgggcgacacattgctgacaatcttggtgaccgtattgttgacactgacattcaccgtcctgattgattcccggccgttattgttctgctgctgatctaaagcgcccgtatctagcccttcatttgaaaggtacggcatgataaacgccattaatacggcaccgacaatcacgccaatcaggcttgaaagaaaatatccttttttgcttctctttggctgttcaggagtagtatgttcttcctcacgttcgtaatccaccatattccatcctttccaagaacgttaatatggttatattgtgggttagaagctcctagaatagtcatgatttacatagaaaaattatacagcgcaaagcggagtggccttcttcggatcagtgtcgtataagtcaaatgtctcacccgtcacaaatcctttagaagccaatgtctgctgcacggacattcttgccagctccttcatgttgttgtcctggctcaaatgcgccaggtaaatacgagacgtctcatcgccaatgacatccgtcatcgccaaggcagcatcttcatttgaaacgtgcccgacgtcacttaaaatccgccgcttaatgctccatgggtatcttcccatttgcagcataccgacatcgtgattgctttcaaacacaaacacattcgctgaacggataatgcctttcattcggtcgctgacatatcccgtatctgtcattaacgcgagctttcggccgttataatggaacacataaaacatcggttccgccgcatcgtgggagacgccaaacgattcaacatcaagtccgccgaacgacttcaccgtctccatcggaaatacaaacttttgatcggtgtcaattttgccgatttgattctccatcgctttccaagtcttctcattcgcatagatcggaagcttgtactttctggcgacgacaccaaggcccttaatatggtcactatgctcatgcgtcacaaaaatgccgtctacatcatccagcttacgcccgatctgcgccatcagcccatccatggcttttccgctcaaaccggcgtccactaaaaatgcgtgatcctctgtttcgaggtaaaacgcatttcccgtactcccgctcgcaagtacgctaaattgcaagctcatgtttgtctcactccattattttcattgatctgtatctaaaatcgtactctccaaagcattcacagtaaaatactcttgtactgtctttttctcaccgttcacttttttctcgtactcgaccgtaattctccataccggcgccagcacctgcgtacttgtcagtggatattgtgctacatagccgaatttacagctcttcacagtgctgtattcttttaattgattttgatagtacaatagctcaaccgcatccatttcagtaattaagctttctttctggatttgcttgaaggtctcaagcgttgtctggtcgtacgacacaacctcgtttttaccgtttaagtgcaataccacttgcccgatcatattagcgggattatcggtcttttggtaaatataatggccttcgtacgtttggaagaaaataatttctttcttcgatttattaaccttccaaagcttatatttttcgccatcttgaatctttgaagaaacaagtgcctgagcatcgtcctcgatatccttctttgatagggctattggatttgcaaacttcattttcaggctcgttactttatgatcatcactaggcatgtccatcaaaggcttttgatccttcagcgcctcaatttcctccttggtgaaggctttttgatttgccgtgatccgatagccttctgtcgcttccttattcaagccttcatacgtgatatgatcggccttcatgtcatgctcgacatcatttttaatgacttcatattctttgccggtagcctgccatttttgaaaaaactgatagcctaagaaaatatctaaaatgaggaaggcaacgatgaagattgattttgtcttattccactccactgttagccccctccttcctcaataaatcctttgtaatcggcacaatttttccatttactttcatcgcccaaaccggttccagttcaacgagaggatcatcgttggttgatgttgataccaattgataagcaaggaagatctgatcaattttgtccgtatcataagcggtttgtttcgaaagcagcatcctcacttcgctgccgctcatgagctctgtttcacttgttttaatcggattcgttccgagactgtaattcggccgcttatagctgagaatatcatcattcgcccattgcaccgtaatcgccgatgtcgccccgaaaggtttggtggtgctgttaatgaccgggatctgatccataaagatatagaaactcagctgctggctgtcattgatactgaaaaattgatagtgatccgtccagcttccggtatcctcaaggtatttttggctctttttgattaattcacctgtttgataggatgtgctctgcaccaaattgcgctgttgaaattgcacctgtcgctggcttagattcacatctaaacggctgatcccatctgtcagcacatttctgttgttgtaattcgaatcttctcttacaatgctcggatcactaaacaaagcctgcttaaaggtatttgttttaatcgattctgtgacaaattcttttttgtccatcgtaagcggtttgttcggcagcaagaactctttctttgagccaatggagaacaaactgaacgccggcatatttgattgcctgtttttcaagtcgttcataatgttccggtagtttgctgactcaaccgtcacttcaagaatgagctgtttgctgtaagacaccaaatagattttcttgttcgcttttgtttcattgaacgggatcagaatatggtcaaacgaactgtattcaaacgactgattagaccatttaaacagcgtttggaaaatatcaatcggaatcgtatcgctgaattgcaagtcaagcttggcttcagaaccgcctattccataaaaccagcttttgaatccagccttgtcatactgatccgaaatatctttaattcctttcacatcccaatgtggcaagtcagaccaaatttcttcatagagggcattgtcatccactttgtaatgagcgccgtcatcatggataaacatgtcccttggccttaccgtttcagacagcttttgagtggttttttcgattttatgtttcacacgaacagtagactctgttgaggatgagccttcagaaaagtttggctggaacgtccatatcccccatgtaaaaacaagactgatgacgacgagtaccgtaagtaatatcgtttttatattttcacgcttcatcccaatcatcctcttgttcctctttatatggaagagtaaatgtaatcgtcgtgccttttccttctatgctgtccgcccaaatatctccgccgtgcgcctgtaccatttccttggcaatcgccaatcccagaccggtgccgccaagttttctcgttctcgctttatccaccctgtagaagcggtcaaagactttttcgacatcttttttcggaatgccgatcccttcatccttcacgctgatatagagaagttcttcctcttcattgacatcaatcgagaacgtgacatgtccgccttccggtgaatattttaaagcgttagaaataatattatcgagcacctgcgtaattttatcctggtcgatctcgacgtacagatctctgtccggcagattgcggataaactccacatgctgctcttttgtcatttcaaaacggtcaataataagcgacataaaccggacaatctgaatccattcccggttaaattgataatccttactgtcaaatttcgacagctgaagcagatcattgacaagccggatcatacgctctgtttcattttgtgtcaccattaagaagcgcggagcaatgtctttattttcccacgcgccttcagctaacgcttctaaatagctgcgcattgtcgtaagcggcgtccgcagctcatgtgatacattcgcaacgaattctctgcgttcctgatccattttctcttgttcggttacatcgtaaatgacagcgattaaaccatcaattttgccgtgttccctttgaatcacagagaaattcacgcgaagcaccgttaattcatcatcgcgctcaatttcaagcagcatagaatcctgctgctccactaaatcttcaaaagtataattctcttgaagccccagcaaactcgtaatcggcatttctaaggctgtttcacgtgaaacgttcaacagctccagcgccgggctgtttaagagaataatcgctccatttcggtttgtagcgattacgccgtctgtcatataggcaatgacagaggctagctttctgcgttctccttcagtcatcgcctgggcatcttcaagctctctcgttaagtggttaaacgttgtggccagctgcccaatttcatcatgcccgtactttttaaccttcctcgagaaattccctttcgcaagctccatcgcctgctttcgcatatctgaaagcggatgggtaatggttcttgccagaaaaataccgagaagagccgtcaaaacaagtgccaaacctgtgccggacgccaatatcgtgttgatcgtcttcatttgattaaagacatcttccatactcgcgacaacatagatcgcgccgacaacctcttggttttcagtcatgacgggcttcgcggaaataagaactctgattttgcttttcgggtcataatattttcttaaatacgactgtttggtagaaaaaattcttttgaaaatcagatcggtcgtttgtttccctgccacttcctcaccatacggctttgaagaaccgaccacttcatagcttttatctacaaagctaatttcccgaacctcatcacttttcgtgaagtcattcaaaatacggctgacgtcatcctttatgacggtgctgtcgttatcgctcttatattcttgttcgatataataagaaaggttgtcgattcgctgattcagcgattgttcataagagctgatcagcgacttctctacctgattgacaaaatacacaccaatgatttgcatggcaatgataatcaaaagtacataaatcaaggtaatcttaaattggatcgaccgaaaaaaaccaaccttattcatatggtcattagtcctgttctgggtttctcaagtaataacctacaccgcggcgtgtgacgatccaatttggatggctcgggttgtcctcgattttttcacgaagccggcggactgttacgtcaaccgttctgacatcgccgaagtaatcatagccccaaacggtttgaagcaaatgttcacgagtcatcacttgtccgatatgttttgctaaataatgaagcaattcgaactcacgatgagtcaattcgattgtttcgtctcgttttgatacaacgtacgcgtcagggaagatgacgagagagccgatatgaatctcgttagaggaaggctcttcctccgcaggcgctgttgtcagctggcggcgcaggttcgcttttacacgtgccaagagctcgcgtgtgctgaatggttttgtgacatagtcatcagcaccgatttcaagcccgataaccttgtcaatttctgaatccttagccgtcagcataatgattggcatatcgtatttctttctgacttcacggcatacttcaacgccgtctttattcgggagcataatatctaaaagaattaaatcaggctgaagctcttctaccatttcaacggcttcgtttccgtcgtgggcacagtgcacttcatagccttcttttcttaagttaaattccaatatatctgcaatcggtttttcatcatctactacaaggatctttttatccatcattttgattttcctcctgccgaatgacttcatttcatctatataacattcgtttcatcacttatggcccatgtaaagaatgggtccttgtctattataacggtttaaggtcaaaagataaaaaaaataaaggtttagaaaaaaaacacatgtttcacctttatcgccagttgtttatctattgtcatgctggtcaactttttttaaaaaagataactttattgaaacctcccttcaccggagtgcgtctttatcaatgacgtcttcttctttgaaccggccgcagggccggttctccctttttcttctattataacactcctcatgtttgcctttttcctaaaagaaaaaacgcacctacgattgcagatgcgtttggtaagtggctcgggacggaatcgaaccgccgacacacggattttcagtccgttgctctaccaactgagctaccgagccaaatgttttatttttctctactaagtaaagtaaaatggcggtccggacgggactcgaacccgcgacctcctgcgtgacaggcaggcattctaaccaactgaactaccggaccttacagtaattgcccggagagctgtcgtgtcagctctcacagacaaataaggaatttagcaataacgctaaagtaaatcaatgacccgtacgggattcgaacccgtgttaccgccgtgaaagggcggtgtcttaaccgcttgaccaacgggccttcacgaaatggtgagccatgaaggactcgaaccttcgaccctctgattaaaagtcagatgctctaccaactgagctaatggctcttaaagatgtcggaatttctatagagcaaacgacttagatctagttctcatcttgtactctattgaagcagtttccgtaacaacgagatttataatatcacgaacaaatagaagtggcaataacttttttggttttttttcatatttttttctcagaccaacttatatgcagctttcaaacaaaaaacaagccccttatataggggcttgcagacatattctatttagttcgcacggtacacactgcgaaggacatttgtttgtgagcggtctggaccgacagagaaaatagaaagcggaatgcctgtcagctgagacacacgctcaagataatggcgcgcattctccggaagctcgctcaagctcttcgcacctgtaatatcctcagtccagcccggcatttcttcatataccggctcacattcagcaagtgccttaagacttgctgggaattcttcaatgatttcgcctttatagcggtacgccacacagattttcaacgtttcaattcctgttaggacgtcaattgagttcagagaaagatctgtaattccactcacacggcgggcgtggcggacaacaacgctgtcaaaccagccgacacggcgcgggcggcctgttgttgttccatattcgcgtccgacttcacggatttgatcgccgatttcatctttcagctcagtcgggaaaggaccgtcgccgacacgagtcgtatatgcttttgatacaccgacaacgtgcttgattttggtcgggccgacaccagaaccgatcgtgacaccgccggcaaccgggttagatgacgtaacaaacgggtatgttccttggtcgatatcgagcataaccccttgtgcgccttcaaataatacacggcgcccttcatcaagagcatcgtttaagacaacagatgtatcgcaaacatactttttaatctgctgtccgtactcataatattcgtctaagatatcctcaagtttaaacccttctgtctcgtacattttctcgagaagacggtttttttcttcaagattgcgctcaagcttttccgcaaacgcgtcacggtctaacagatccgcgatgcgaattccgatgcgggctgctttatccatgtaagcagggccgattccttttttcgttgtgccgatcttgttagcccctttacgctcttcttccacttcatccaatttcaaatgatacggcaaaatgacgtgagctctgttgctgattctcaggttatctgtactcacgttgcgctcatgaagatacgcaagctctgtgactaatgctttcggatctacaaccattccgtttccgattacacacgttttatccttatagaaaattccagacgggattaagtgaagcttatatgtgattccgtcaaacttgattgtatgccctgcgttatttccgccttgataacgggcgatcacttctgcattttctgataggaaatctgtaattttaccttttccttcatcgccccattgcgtacctactacaactactgaagacatgtccgtgcacctccgttaacctttcaaaacgattctattcaaacaaatcaagtttatcagtgaagaaacagaaagtcaattgtaaatccgaacattaaattattgtaaatctatattcgttcgctttcattcgttttataagcgttttctcacggttttgtcataaaaagcttgcgaaactttcatcctttagcataagaaagaatcacttgcctgatatcccttttgaattcataaaaacgacccgccagccgtccgggtcctctatcgtcactcccccattgctccagtacgggttctctgattcgacctcttgatagcccatgtgctttagctttgaagtgatcgctgccagttcatctgcattcggcacataaaaaacaagaaggctgtcgggatggggaacgggggcagtgcttccaccttcatactgggtgaattccaaatgataatcggcatgaggaaggccgaacatgacaccgtcatacccgttatgctgtgaaaattctcctattcgtttcaaacacagtccctcttcgtaaaaacgaataatctcatcaagctggcccgtaggacgcgcaattcggatttgtgctgcgtgaaaagacgaaaaacgtttttccatattgttaccatctcctttttgcaccattttattaaaacgctttcagattttcatccgctgagcgaacggtatttcttccatctttcgaatgaaaaaaaccccaagagcagctcttggggcttatgcgccgggcggaactcctgcgtcatcaaaacgccgttccaggttgacgaatttgttgtattcttttacgaacgcaagagacacggttcctaccgggccgttacgctgtttggcgataataatttcgataatatttttattctcggtttctttgtcatagtagtcatcacgataaaggaacgcgacaatatccgcgtcctgctcgatacttcctgattcccggatatcagacatcatcggacgtttatcctgacgctgctcaacacccctggaaagctgagaaagcgcgataacagggacttgcagctccctggcaatcgacttcagttcacgggaaatttcagatacttcctgctgacggttgtcctttgaacgaccgcttccctgaatcaattgcaggtaatcgatcaaaatcatgcccagcccgctttcctgcttcaagcggcggcacttggcacggatttcactcactcgaatacccggtgtatcgtcgatgtaaatcccgctgttcgacaggcttcccattgccatcgtcagcttgccccaatcctcttcggtcaggttacctgtacggagattctgggcattgatatttccctcggcacagagcatacgcataacgagctgctctgcacccatctcaagactgaaaattgctacgctctcatcggtctttgtcgccacgttttgtgcgatgttcagggcaaaggctgttttccctactgacggacgggcagccacaatgatcaagtcgttgcgctggaaacccgcagtcatccggtcaagctccgtaaaccctgttggaattcccgtgatatcaccttttcgattgtgaagctgttcgatattatcataggtctggacaaggacgtccttaatattttggaaggcactcgtgtttttgcgctgtgccacttccataatcgttttttccgcttcactgagtaaatcctcgacctcatcctcacgggtatacccgtcttgagcaatcgttgtcgcagttctgattaatcggcgaagaatcgatttttcctcaacgattttcgcgtaatattctatgttagccgctgtcggcaccgagtttgcgatatctgtcaaatatgaaatgccgcctacttcttccagcaggtctgtgttcgcaagctctgatgttactgtcaccagatcaaccggttcacctcggtcaccgagcaccagcatcgcattatagattttttggtgggacattctatagaaatcatctggaatcaatacttctgaagccagtgttaaagcagacggctgtaaaaaaatagcgcctaacacggcttgttcggcttctatattttgcggaggaagccggtcattcagaaggtctgtcatgctaagcaccgtcctctcattaaaaaatctccaacctccattctaccatttctacagaaaaaaaatagaaaaattgtctgtttcctgtttttttcagttagcagattggatcgtttcggacagtaacaaggcgggaaaaatgcaataaaacatgagggaggaatgaaagatgataaagaaatatgcgattacgcctaatgttgatgcggacggctggtttattgaggtggagaatgtagcgccgacagctttgtatacgtctaaagacgccgctattgaaaaggccaaacaggtggctaaggaaaacagtccgtctaagcttgtaatttatgaccagtttaaaaatgtggaagaagaacactcattttaatgaatgaaagccttcgctgcagcgagggttttttagcggttatcggtttatttcatccattggatgcctatgtgcatcatcaaatctgccgctttttgatacagatcccactccccgatcgaagcaaatttccccatcagctcccgaagctttagcctcactgctatatattcttcgaaagtgacagctttttcagtgtctatttggtgttccttcagcatttgttttaataaagacaacggtgcgtgcataagaaccctccttacctcttttataacggtcattttccgattgctctattcctttgtgacatcttcttacatttcacatctgattcttgtacaatggacagaagagaggagggatcttttgtgagacctttgcaaatttctgctgaaactgcacaaaagcttgcagagtccttgaatctgccgcttgaacagatcatgcatatgcctcagcatattctgcttgccaaaatggctgaactgcaaaaagaggacaaatcatagccttcattcacatacttgcttacctgtttcgggataatatcatgtatatgttagaaaagaggagtaactgctttgccacatccacataataaaaaaatccaatcattttggctgatcaccggcattatctttatcgcctttaacttacggcctgcgatcacttcagtcggtccggtcatcagctctatccgggcagagctgcacatgtccaatggggcagccggttttttgaccgcactgccgctgctttcgtttgcagttctttctccgcttgcacctaagcttggacaacgcctcggaaatgagcgaactttatggctaggtctcgtgatactgcttatcggtgttttgactcgttctaccggctatactgccgctttgtttttcggaacggcacttatcggcgtcgggattgcgattggtaacgtacttttgccaagcttaatcaaacataaataccctgaaaagccagggatcatgatcagcctgtatacgacatcaatgaatatattcgcagctttagcatcgggtgtcagcgttcctttagcgacccagatgaatcgcggatggaaacaagcctttctcttatggggcgggctggctttgcttgcattgctgatctggatacctcagctgcgccatcgagatacggcaaaccagacaatgaagctgcaatccagttccatttgggcttccaaaatggcatggtatgtcaccatctttatgggcctgcaatcgtttttattttacagcagcatcgcttggtttcctgaaattctccgttcacacgggattgatacggcaacagccggatggatggtatcactcatgcaatttgcgagtctgccttccacttttctgacgccagttttagctgaccgtgtgaaacagcagcgcggtatcgttgcggcgctggcctcagtttatctgatcggcctctgcggattattagcgggcggaagccatacattgcttgccatctggatgatcattatcggtatcgggcaaggctccagcattagtctggcgctcactttgattggtctccgcagtgaaaatgcccaacaggccgctgcgctgtcaggcatgtctcagtcattcggctacctgctggcagcagtcgggccaatctttgtcggctatctctttgaccagacgcattcttggacgatgccgattgtgcttctcattgctgccctgatcgtaatgggagcagccggacagggagccggacgagatcgatacatttttcagtctgaaaaaaaaagaaattcagcataaaagcggggaaaatatctccgcttttttctttgaatatttatggtttattcataagtttttcatatttgttttttacaattagacaccataaagaggtgaaaaacgatgaaaaccaaacgattcgacgcagcccttatttttattttgctgggagcagcttttttgaatacgtatcacatttggcaggatgatgcagcgaaccagtactatttggcggctgtaaaaagcatgacgcaaagcttccataatttcttttatgcgtcatttgacccttctggatttgtgacagtagataagcctcctgtcgtgttatggattcaaacgattttcgcactgattttcggtgttcacacgtggagtgtcatcattccccaggctcttgccggagttggatctgtcttccttctctacagaatgattaagccgacttttggagttggagcggcccgcattgccgcacttgtcatggcactgacccctatcgcagtagctgtcagccggacaaacaatattgatagcatgctcgtttttaccatattgctcggttcagcttgcctgtttcgggcagtaaaacaaggcaagctggtttggctgctgatggcatttgccctgattgggctcgcctttaatatgaagatgatgcaagcgtttatggtattgcctgcatttgtgttattctacctggttgcatctcgggtttctctgaagaaaaaaatcgggcccctgcttctgtctcttgtccttctgacaggcctttcactctcatgggcgattgcagtggattcagcctcttcctcaagccggccttatgtaggaagcagccagaccaactcagtgctagaactggcctttggctacaacggcacagagcgtctgcttgggcaaactacgggcctagcaaagggtgatatgaatgctgctggcggagggaacatgcagaatcaagacaacatgcaagcgccaaatggcaacggttcatctttttctcagaacggaaatcaatcattcggaaaccattcacaggcgcctcagccgcctaacggacaaaccggcgctctcaatggaggcggaggcacacctcccacaggtggcaacgggcctggaaatggagggcctggcggcggaaaaagtatgaatatgttcggcaccggtgatcctggcccgcttcgtcttttccaatcagcactttccggccaaatcagctggatgcttccattctcattgatcggattactgggcgcaatcgtcagctggtaccgtgatcgccgcggacatgctgctaaaatgaaagaaacgctattctgggcggcttggcttgttcccgtggctggtttcttcagcatcgcaggattcttccaccagtattatttgattatgctggcaccgccgattgccgccctttctggtatcggatggtatacgatgcaccgcttatacaaaaataataaagactggtccagctatcttctgccggcagccgtcttgatcacagccgtgtttcagatgtatattctgagcgcttatacaagccaaatcggcagtgtatggatgtatgtcctggggctcttaggactgggcatcacccttgcacttctgatgcttaaacgcagccatccgttcagtaagctgctgaccatcatcagcttgtgcgttctgcttctcacaccagtttactggtcagcaacgccgcttctatacggtggtaacagcgtccttcctgaatctggcccgcagctcaaaggctcagcaaacggcgggaacatgttctcttcagaggtcgacagcgggctcctgtcctatctgagaaaacacaataccggcgaagaatacttatttgctactttgacaaccgtaacagctgcgccatacatcatttacgaaaatgaatctgttatggcaatgggcggatttaacggcacggatcccattctgactgtgtcggaactgaaaaaactgatcaaagaaggcaaagtgaaatacttccttctgtcagaaaacaactcaggcaacagcgaacttgtttcctggattaagaaaaacggaaaagaaataacatctgacgagtacagcggttcctccagcagcacgaacagcgtgcagggaatgcgaggaggacctggcggagaaagccagcaaactctttatctcgtggaataaaaaaaagaggcttggatgaatccaagcctcttttctattaagcttcttcttttacatgtacctttaacacagcctgcacttcaggatgcagcttcacaggcacgttcgtatatcctaatgcacgaatcccgtccggcagttcaagcttccgcttatctactttaatgttatggtctttttggagctgttcagtaatttgcttgcttgtcactgaaccaaataaacggccgccctcacctgattttgcgctaagctcaacagtcagtttttctaatgtctctttcaagctcttagcctgctcaagctcggcaatggcttcttttttctctttctgctgttgtccgtttagcgcgctgatgtttgaagcgttcgcttcaaccgcgaggccttttttaattagaaagttatgcgcataaccgtctgctacgtttttgacttcgcctttttttccttttccttttacatcttgtaagaaaataaccttcatctctgtacgcctccctcaaaatactcatctatggcgtgcttcagccgttccagcgcttcagaaactgaaatgccggacaactgagtcgccgcatttgttaaatgccctccgccttccagggcctccatgatgatctgaacatttacctcgccaagcgaccgcgcactgatacaaaccgtttgttcatcccgtctcgccaccgcaaatgaagcctcaacctcactcatcgacagcagtgaatcagcagcctgcgcaatcagcacttgatcgaagtattcctcttcattttcaggaagagaagcaatcgcaatgttatctttatagaggaccgtatgctggatcagcttcgcccgtttaatataggaatcaacggtttctttcaggaacttctgcaccagcaccgtgtcggcgccttttgcccttaaataagaagccgcatcaaaagtccgcgagcccgtgcggagagaaaagctctttgtatccactattataccagctaatagggctgttgcttcaatcatattgatttttaagcgcttcggctgatattcaagcagctctgtcaccaattccgctgtggaagaagcgtatggttccatataaacgagcagcggatctctgataaactcctcacctctgcggtgatggtcgatgaccacgatatgttcaattttattgaccagccgttcctccataacgagtgacggcttatgtgtatcaacgatcacaagcagtgtgtcatcattggaaatttccattgcttcttcaggcgtaataaatcttgaccacagttcttcatattttttgatttccccaatcaaacgctgcacacttgatccgatttgatttgggtcaatcacgataaaaccatctttgttatttgcctgagccacctttaaaatcccgatcgctgcgccgatagaatccatgtcggggaatttatgccccatgataatcacattgctgctttcggtgacgatttcctttaaggcgtgagaaatcacgcgggcccgcacccttgttcgtttctccattgggtttgttttaccgccgtaaaacttcaccttgccgtttggcagcttaatggctacctggtctccgccgcgtcccagtgctaagtccaagctggattgcgccaaatcgccaagttctttcagggaagagactgaagccccgacaccgacgcttaacgtcagcgctacaccgtcaaacgaggttttttcccgcacttcatcaagaatcgaaaacttcgaattttcgagttcagttaagatgtgttcattaagtacagcgataaagcgttctgaagacgtccttttcaagaagatcccgtactcctgcgcccaagcgttcagcaaagatgtcacctggctgttcatcgtgcttctcgtctggtcatccaatccttgtgtcacatcatcatagttatcaaggaaaatatatgccaggacggttctttcgttttcatatagcttttcaatctgaatttgttctgttacatcaaagaaatataacagacgctcatcccgtttgatgacaaccctaaacttgcggtcattcaatgtaaccgtttccgattccacctcttgtttgataagcggcactaccgattcacaagtatcgtaaagtgatctccccactaaagtgctttcattaaagcaagaggaaagaaacggatttgcccattctatataatattggtcattaaaaagcatgattccaatcggcatttccatcaatgcctcttcaccgacttttttcaacctgtaggacaacgtagaaatataagcatcaatctcttgtcgaataagagaatcagcacgcttaataaaaaacaaaataactgccagcagcagcacttcgacggttcctaatatccagttaaaataaaagctgatgaggattgtaataattgacagagcaatcaatgcatagatgggataccgaaacagcggtttttcataaaagcttggcatttctatcactccccaccatgtgagtaaaactcatgttcacttcaccttattccttatatgaaagcccatatctaaaacgcctaaaatgcgaatggctgccatgaagaccggatgcacaaacccaagtatgacagcaatcacagccgcagcctttggatattgtttcttatggcaatagaaaaagataaatgataaaccttggatgaaaatcagaaacccgagtataaactccccatttaaagcgatagagtacagcatttggcctttttctaaaggcaaaaatgaaagcatgacaataatcaaatacagtactacaacactttgcggaaacttcaactctctaaaaggctttagattaggaatatcgggggagaatcgccttaagagcggcttagcgataaggtaactgaggaaagaaaaaataactcctaccatcacaatagctgttggaaaaagatattgaacgatacccaattgttcttccatcagttttaattgcttctcaaactgtccagcattgcccgactgcttcgctacagtttctaccatatcaagagattgccggtattgtgtcatcgcctcatcaatgatattgatacccaaaaactgaatgcttatcacaaaatagaagacaatactaagcatataaataagagcgcccgaaataatggcgtgcccgggctctttccttttgaaaaaatgtcccatggcaatgccggcgcaagctgacataaaagctacaataagcccgttaaaggacccgacaataaaaacaaccggaagactgacagcgcccatccatatccctagcttcaatccatgtctgatcgtatacaagatcattggcagcggcagtgcaaataacagaattgttccaatcacaggaacataaacgaccagaagcgtgatgatcgcaaacagactgattaaaatagcaccttccattaaagctctcgtttgtttcacttagtcacctcgtatcatcctgaacatacgaatagaaaagagcagcataaacgactgctctttttcatcgctgcaacatacgttgcaccgaatgtttttatatcatctctaaattttacttttatattttaacataagtccaaatcgcaagtaaaatgacgctaatgtttcatgtgaaacataaaaaatgaaaagacattctttgaaaagaatgcccatcacaattaatgtttatcatccataaagccagaagattccttgtttttctttttcgtttttctgacatacataaaaattaagatcaccagtaaaagggttgttgcttgcagaacgccgctgctaaacaagaaaaagttctttatcatgtcccacattgtgtttcacctctttgtgcatgttctcaacccgtatcctatataaggtgaatttccctttttataaacttcaaaacatcatgaacaacattgagcgttgggcatatgctgatatggaatctgatcgataaaggagaattttcacatggatgaacgcagaacattggcttggcatgaaacattagaaatgcacgagctggttgcttttcaatcaaacggactcattaaactgaagaaaatgataagagaagtaaaagaccctcagctcagacagctttataacgtgtctattcagagcgttgagcaaaatttgagagagcttcttccgttctttccacaggctccgcacagagaagatgaggaagaagaacgcgcagataacccattttacagcggtgacctgctcggttttgccaaaacatctgtccgcagctatgccatcgcaattacagaaacagcaacacctcaattaagaaacgtactggtcaaacagctgaatgctgccatccagctgcacgcccaagtttatcgatacatgtatcagcatggatattatccgtcttacaacctttctgaactgttgaaaaacgatgtcagaaacgccaacagagccatttcaatgaaataaaacaagcagcaaaggagttccctttgctgctatttctgctgatccttcactaagccgttcgaacgataagattccagcacgtctctgttggattctccccattctttcatttgcaaaacaatcggttcaagcgttcgcccgaattctgtcagagagtactcaaccttgggcggcacctgttgataaacctcacgatgcacgatgccgtccgcttccagctccctcagctgaagagtaagcattctttgagtaatactcgggcagattcgccgaaactcattaaatcgtttcttgccatctatcatgtgataaaaaagaattcctttccactttccgccaatgacatctagagtaaattcaactggacagccttctttgttcgggtatatattcttttttccactcattcttgaccctccaatagtaccttttttgatactacattacattttgcaactaagctacccagtattttacacaccttttctccttagctcaaagaaaatgcttcttattcacatcaatttttaagggtttgcatgattacacctgcagcaagacgtgttaaactatataaagattacactacttaaaaaaaggataggagctatcatggaaaagatacttattttcggacaccaaaacccagacacagatacgatttgttctgcgattgcttatgctgatttgaaaaacaaactcggcttcaatgctgagcctgtccgtctcggacaagtcaacggcgaaacacaatacgcgcttgactatttcaaacaagaaagcccgcgtcttgttgaaacagctgcaaacgaagtaaacggcgttatcctggttgaccataacgaacgccagcaaagcatcaaagacattgaagaggttcaggttttagaggttatcgaccatcaccgcatcgctaactttgaaacagctgagccgctttactatcgtgctgagcctgtaggctgtacggctaccatcttaaacaaaatgtacaaagagaataacgtgaaaatcgagaaagaaattgccggccttatgctgtctgcgatcatttctgattccctgttatttaaatctccaacttgcacagaccaagacgtagcggcagcaaaagagcttgcggagatcgctggcgtagatgctgaagaatacggcttgaacatgctgaaagcaggcgctgatctaagcaaaaaaacagtggaagagctcatttctcttgatgcgaaagaatttacactcggcagcaagaaagtcgaaatcgcacaagtaaacacagtggacattgaagatgtgaaaaaacgccaagctgaattagaagctgtgatctcaaaagttgtggctgagaagaatcttgatctgttccttctcgttatcacagatatcttagaaaatgattcacttgctcttgcaatcggtaacgaagcagcgaaagtggaaaaagcgttcaacgttactttagaaaacaacacagccctcttaaaaggtgttgtttcccgtaaaaaacaagtcgttcctgtcttaacagacgcaatggctgaataagcaaaaagcatcccgcatcgggatgctttttcttattcacccagcttctcaatttgtcccatcacatcagtaatttgctttgcgttttggaccaggtctgactgctccaattctttaagcgataccttgccttcctcggcttgtttcaacacctcttcagcgcttttctgcaaggtttcgttatgctcctgaatggttcgatgaatctccgctgcggcatcaggcggcgttaattcattaaaatcagcggcatccttctgaatcgattcaagctgcgcttcaagtttttctttcgcctcggtgtcatttacagctttctcagccaattcaggcgcttcctctgcaaatgtcttcaccttctccacataccccgctgcttcactcgtatagttcaatccgtcgttcacctgatcaagcatgccgcatccgcctgcactcaaaagtcccactccggcaagtactgtcaaaatgatcttcatcttcagccccctcatcgtttctttttcattttttcttttaagatcggaatcaatttctctttcgctaacggcagccctttcctcaccaattcacgcttcagccactttttcagcttagacattctgatgctcctctccctttttgataaaaatgaaaaaactccaccaatttggtgaagttcctgaaacaaaaagaccttcaccaaatcagatttggcaaaggtctcgctaacaaatgagattgccagcaaagccgaggacaacttgtcccgtaatgacgactttactgtgaaagctactcccctttggagtgttcatttttattactttcattctaaagcaccgatctgttccagtcaaattcctgccgtttatataaaagcgcgctgtggtatttaaaatttgaatggtttttccatcaggagatcatgctatgacagaggaggttttcatcatgagtcaagagcgcgtgaaacggcctgggcataccagatggtacatatcttcgttacttagcggcattattattcttaattattttgaccgagtggccatctcggtagcggcccctgcgatacaagattcgtttcaccttactgcaactgaactcggcatcgtgttttccatttacacctattcctatacactgatgcagctgcctgtcggaagtttgctggaccgttttggggtcgcatgggtcacgagggttggaatgacaatatggagctttttaacgatccttcttgcttttttgcaaggaaaattgctgttgtatctgttccggtttctcattgggctgacgagcgcctctgcgttccctgctgcctctaaagcaaccgctctctggtttcctccaagtgagcggggattggcaaactcactgttcgattcggccgccaagttttcaaatgtaatcggcgcgccattggtcgcctttcttgtcacaacatttgactggcgtgtcgcttttttgacgattggatgcatcaatgtgctgtttacgatctttttctggcagtattatgaacagcctgaacggcacaaacgtatttctaaaagtgaactaaactatattcaaaaacacaatgccattacaacagagcaaatcccttacaaaacgggcccgcttttaaaaaagcttttcaccaatcggaaagtatggggcttaatgatcggatttacagggtacgggtatacattcaacctgctgctcacctggcttccgactttctttaaacatacatacggtatggatctcatgtcgtccggtttatttacggcagtgccgtggctgatctcaaccatttccggaattgccgtcggcggctggctcgtcgattattttattaagaaaggctatcctaacaccaaggtgtaccgaaccgtaatcatagtcggaatgagctttggctttttctttttaggctccattctgacgaacaatattaccgtagccattatttgcatttccatcggactcgccggaatttcagcaaccgctccggtcggctggtccatctccgcagaactcgcgccgatcggttccgtatccatgctgagctccatggtgaatctcgcaaacaacctgttcggaggcattattgctgcgtcactgacagggtatttgtttgatgtgacaggctcctttacactcagctttctggtagctggttttgtgctgttgctgggattggttttttatgtgtttgtattaggggatgtaaaacgaattaaactggaatgaagagtgcttgctgaaaagcactcttttctttgaatccgccaggtgttattttctttctcccaacattcactaggctgtcttcggacgaaaacaccaccattttatccttgactccaaccaaaggtaaggcctcatagtgaaagaagaaaggaggagtcagatggtgaaattaacagtaaaagaactatccaatattgcgaatgtcacaatcaaaacgctttatcattaccacaaaatcggcttgctagccccaaaggaaataagcgaagccggatatcggtactatggtgctgaagaactaaaaagactgcaggaaatccttttttacaaagaattagatattcctttgtcagaaatcaaaacattactaaaagaggatgctgaaagaacaagtacattagaaaaacaaaaaaagctgtttgaaaagaaaattgaaaagtatcagcgtctcattcaaacagtcaacacatctttagaatacacgagaaaaggcgaaaacatggatcataaggtaatgtttaaaggatttgaaagcgctgaagaatggaaacaatctttagcagaacaaaatgggtatttaaaagagcgttacgattttgaattggatacacatacaatcaatgtcgatgaaatgaacaaaatggcaatagaggctaaacattttcttgataggatggctgattttttaagaaacggtgtaacgtatcatgacccttccgtgcaagagcatgtcatgaatcatcttaagttcctaaatcagaacgggcatccgacaagtaaagaagattacgtaaaacaaacacgtttttttatgcaagatgatttccatagaggaatgttagaagagcagcaaaccggtttatcttattatttggttgtcgttgcagaacacctgtagtgttttgtcaccctttatagggtgacagccatcaggattacgagacagcaccgccaacaatcgaaacattctgccggtcaacggcaaaacgccgtccgttccattttaatacggtttgaacatatcccaatgagtcggcgttataccttcccgctatccgctggtacgccaataattcgtatacgccgtctctgtcaaaatcaaccggatacaaacccgataaaggattcacccatccttctatcggcatttttaacacaccttggctgttataaatctcattcaaatattccctgcctttgtaagtaaggtcgaggatatacgtttcgttttgctgatgactgatgacgctcgctttatattgattttgatacctcacactgtactttaattcatcattcaatacatctgaattgaaaattcgccggaactgcctgtttagataggcaaacacgtatgcataaatagcaccgccgcttccccctgtatctattaccaccgccacatcctcaatcttgtcgcctgtcatatcccccagaaaaagtgacggattgtatcccatattgttttgaagctgaatctgctgctcctgatgggttctgccatcacagatcaccaatgtgatatttctccataacaggctgccgggcatttgatttccagttagaaagacctcatcaataacgccgtctcccgttacatcgccgcgagtagatgcaatgattgcacgtgaggagacaggctgccgaaatacgtatggatgttgaacaagtcctctgctttcataaaaccaataaggagccattctgatgtcatacacattcaattgtgtcaccttccctaatcagctgaatgaatcattatatgcaggaatggcacatcaaagacatatcttacacaccaattaaatccgtaccataagagttatcgattacacaaagccactcgccttgcgcattcttcttaaatacataggtcgcccttctttccatcgcatactcggagtcctttttatccgaatcaagcagtgtctgagaaaggacgagtaccgtgtcacctgcttctaacaggatcatttccccttgtttcgggacaatatgatgattgaaatagttcacaatcgtaataaacgcttttttgatttcttctttgcctcgcgcgatcatgcccggcttcacgactaaaacggcatcttccgaataataattcatcagtgtatcaaaatcttcattttggattgccaaatcacacgcagagatgatgtctttcaattgctgttccaaatgaattcccccaatcatcatgattggatatattatacatcgctagaccactgaaaccttgaaaacaaaatgaaaagtatccttttttcctatataatcaaatagatatatttaacaaagtacccaagtgaaggggtgaacattattgtctgcggaagtaacgttacatgacaatatacattatgatttaagtgcggattgccagcactgttttggcctgtgctgtgtcgccttgccttatgcgaagtcggcagattttgcttttgataaagacgggggcacgccttgccgcaacttacaatcaaactatcaatgttctatacataaagatctcagagaaaaaggatttcgaggctgctctgcatatgaatgctttggcgccggccaaaaagtatcccaaatcacttatgagggaaaggattggcgaaacagccccgaaacggccaaccagatgtttgacgtttttcctatcatgcagcagctgcacgaaatgctctggtatttacatgaagctctttctatagatatagccaagccgattcatcctgaactgagaaccagtttcgaaaaaatagaaaggctcaccaggctcagcaaagaacgcttgctgacactgcaggtggacgagcatcgagctgaggtcaatgaatggctgttaaaaacgagtgaactggtgcgtgcccaagcccgccatccaaaactcccgaaaaaggtcagccggggaagtgtcctgatcggcgcgaaactgaaagggcttgatctgcgaggagcaaatctaagaggggcgctgctcatagccgccgatctgagatttgccgatttgagaatgacagactttatcggtgcagatatgagagacgctgatctcagcggcgccgacctgaccgggagcatctttctgacacaggcacaggtgaacgccgccaacggcgattcgaaaacaaagctgccgctgtctgtacgaacccctgcccattggaaataaaaaaggacccgctaacggtccttttttactgatcaattcaatcctttttcgttccttttatccggcattttcacacttcttgccaagtatcccgacagccataacgcaaccagcagcatgaaggtgatcataccgacgacgcccagccagtgaaaagcagaccagaatagccctccgactgttccgcaaacacttgaaccggcgtaataaaagaacaaatacagcgatgaagcctgtgctttgttatgaagggctctcctgcccacccaactgctggcaactgaatgtccgccgaaaaaaccgaatgtaaagagggcaatccccagaattttcactgccagcatactgtttatcgtgaataaagcacctgcaatgacgatgaaaatattcatcaccagtatttttggatagccatatcgatcaaccattcttccaatgaaagacgagctgaaaatgcctacaatcatcacaataaatatccagctggcaaatgctttattaagcgaatacggcgggcccaacagcacatacacaatgtaattaaacaaggcaacattgcttccgagcagcaaaaaaccaatgagaaacaaactgaatagttttcggtccttcaagtggccaatcagagacattcccaatttcccgagcttcaattttcttggcgtaaaatgcctggatggcggcaaatttataaaaaatataacactagcaatcaaactaatgacaccaattgatcccatcgccatatgccaattcaagtactcgctcaggagcccggaaacgatccttccgaaaacggcgccgattgcatttccgctgatatacagccccatcgccgacccaagacttccgggttcaatttcttccccgagataagccatcgcaatcgacggaaggcctgcgagcgcaacgccttgaatggttctcaatacgagcagcgtatgaaagtttggactaaaggccgatgccagacagagaaccgatgcggccagcatggaaatacccataatcggcttgcgcccccacacctcggataatgaaccaaagacaagcatgctcacagctaacagcattgtggtaacagataaagaaagactcgccgcagtaggcgttacatgaaattcccgcgtgaattcctccatgagcggctgtacgcaatatagaatcgcaaatgtattgaaacccgcagcgaagaaagcaaacgtaatttttcgaaaaaccggtgtgcctttttgaatgtatgtcatcgggactttatcggtccctcatcatgttgtggagcactgccattcataaacaaccatcctttatttcttccgaattcaaacatcctcgagtctgtttatattactatcttagcaccgttgatatatgttgtataatgcatataaaatatcattttcatgcttatatgtaataaaggagggatgataattggaatgggaacaacttgaatattttcaaacactggcccggatgcagcacgtcacgaaagccgcaaaaagcctctccatcacacagcctgcgctttcacgctctatcgccaggctggaaaatcatttgggcgtcccgctatttgacaggcaaggacgatccatcagcttaaatcaatacggacacatttttttgcggcgggttcaggcgatgatgaaggagtacaccgaaggaaaagaagaaatccaagccttattaaagccagaccaaggcgtagtctctctcggttttttacatacattaggcaccacgctcgtgcccgatctcatcggctcctttcagcaggaataccccaacattgccttccagctgaagcaaaaccactcttattggctgcttgaacgattaaaatccggagatctggacctctgtctcctcgcttcgattaagcctgaaaatccgatccaatggatcaagctgtggagtgaagaactctttgtatttgtgccaaatgatcatccattagccagtcgcgaaagcattaccctgaatgagattgccggggagcgttttattttattgaaaaagggctatgcgcttcggatgacggtcgatgagctgtttgagaaggccgatatacagccgaacattatgtttgaaggagaagaagcagctactgccgcaggttttgtggcagccggactgggcatatctattctcccagacctgaaaggcttagaccaaagcaaaatcaccaaaatccgcgtcagctggccggaatgtcagcgtgtcataggaattgcctggataaaaggcaggtttttatcaccggttgctgagacctttaaacaatatgtgatcagccatttttctgagtagggaggattcaaacatgaatgtcaaaaaaatcacgtcagaacaggatttacatacagcgtttgaaatcagaaaggcagtatttgtagaggaacaaggctgtcccatttcggatgaattcgatgagttcgatacactccacggtgactgccagcacatcctagcttatcatcagaatgtacctgttggcactgcacgtgtccgtatcgttggccacgcggggaaactggaacgaatctgcattctgaagtcttaccgcaaattcggtttgggaaaagtgatcgtcgatgcattagaacgtattgtgaaagaacaaggcatttctgccttcaaactgcacggccagacacaggcggcaggcttttatgaaaagctcggctatcagactgcatcagaagaatttatgctggacggcattccgcatgtactgatgacaaaacaagacgattctgctttatagattgttcacaaatttgtcacttatgagcatgaacagttcattggtatactaatcaccgattatggagagaaggaatgattgtatgccagcaaataaaaaagagggtcttatatttggcgtgatgatgtgttttggaatggtctgcgtcatgtcgatttacaatgccatcatcaacggagccattcaggatttttcactggtgaccgtttttgaaatggccatcggttttatggtcgccctcctgttcgatttactgttagtgggccccctcgccaagaagattgcattccgcatgccgttcgacaagactaaaaaaatttatgtcatccttgccatgtcaacttgtatggtgattggcatggtactttgtatgtctgtgttcggtttagtgacagcggttctggcaaatgggctgaacggggacagcctcttcagtgcttaccttatgatggtgttgaaaaatttcatcctggcctatccattgcaattactgattatgggcccattagtcagagggattttcatgaaatttgtaaaaccaaagctcaaaactgcaatttaaatagaaaaggagtgagcctgacactcactccttttgctcatgaatcgaatgtaaaacaagctccgcaaaagcctctgcggcaggcagctgccattttttctttttgagtaaatcggatcaaggactgcaccatgctgaagaactttcagcttatgtttttcacttccattaatccctataccttaccaaatagtttttatacaattcttcgttataaagaatttcttcgccatgtgaagagcaaatgagcgttggtttgatttgatctatgattgagccgctatcgatgttctcatttatatcaacactgaatcttcttataggtgggtgtaaatcctccttacttgtgataaaaaggtcgcccgttaatagcgtacgatcgattttatgatcatacacgacatgccccggcgaatggccaggtgttaaatagtatttcagaggcaggtgagcaagcgtttgctccgtcagcggctggacaatatgggctacccctgtgttctccacttcatttttgttcggatatggctcttccccattgatgtattttagttctttctggtgcgcaaaaatcggaatatcaaatctcactaaccattttgatgcacctccgatatgatcactgtggccatgggtaagcaaaatggcttttggattgccgatcgctaacgctgccctaatttgagcatcagcaaaacgttctattcccgtatcaacaatatatacatcatcaccatctttgataaaccaggtatgaaccggaatccgaagaggcacatcaagctcaaattcacattgatagacatgctctgataattgtctcaagttcacgcaaaccactccctttggagatttttgatagtttaaaagaaaaatagaagtgaacggactattttcaaggcagattatcttgaaaatggtcccacactccagcggaccggtattcttgaggaggagacgccgattttcgccagcatcagctcgacttgttaacattgtccattaataatccctcttgttccccttcttcacatactcccaatcacgttctatattcttcctcactctatgaaggagtgcagaaatggtttccttttcctctgaagtaaaaccggacaaggccacttccgtggaatgttctccttctcttcttaacaatggatatacctttttccctttctcagtcgggaacagtttttttatttttttattttgctcatctggcagtttttgaataaatccctgcatttccagcttcttaatggcccgcgcggccgttgtccggtccacctttatcatttccgccaatttttcttgaataattcctggattctcgtatatacgtacgagatagaggtactgccctcttgttaagtccaaatctttaaattcgatgttgcttatggaatccaacgctcttgctatcatgccgatctcacgcaaaatatcattcattcctaaaacccctcacgtatttttgttgcaattacaacaaaaatgttttaaccttactattataagaccacatgcgtgctgtacagtccagactaatatcagaaaaggattgattcataatgaatataaaaagaataacaactgaagctgatttacatgaagctttgaatattagaaagacggttttcattgaggagcaacatgtatcggaatccgaagagttcgatgaatttgatacgctccaggaacaatgccagcatgtcttggtatatcatgagaatcagcctgtcggcacgggccgtgtgcgcatcgttgaccatacagcaaagctggaaagaatctgcatcctaaaaccttaccgtaagtatggattgggaaaagtcatcgtaagcgggttagaagaaatcataaaagaaaaaggactgactgcatgtaagctgcatggtcaaacacaagcagcaggcttttatcaaaaactgggctaccagatttcttcacaggaatttatggaagacggcatccctcacgtcctgatgacaaaagacatatcgcggatttaacatgaaatatattttttacggattaggaatacttatattaagtttgggcatttccttaaccatacaatcaggactgggcacatcacccttcgatgcccttttggtgggtctgtcaaaagaaatcggtcttaccgtaggaagctgggaggtccttatttctgtgatcctcttaatctgcaacgctatattaacgagaaaaaaacctattttgctgggcttgattacagcattcattactggaataggcattgacctatggttgtttgttgtaaaaaacaccctctatctaaacgcgttgttaagcaaactgatttgtttcggaattggtttggtgctcatcggtcttggaacagccatctatcttcagacgaaattcgcatcaacgcccatcgatcatttaacacttattatccgagatctctccaaaagaacaatcttgttttcaagaacattggtatacgctcttttcttagtattagccatcatctttaaaggccctatcggcatcggaaccctattaaccgtctgtttgggaggaatgatccttcacgtttttatgcctattgtggaaaaacaattcttatcaaaaaaaagaaggggttaaaaaacctcttctttgaaaaaacgaaacgcaaaacaagctacgtttcgttcaataattttatgataaattaaaatttatagtaccaaaaaatcgcaatttcatttgctgttggaaggttggaataaagcatcgtatcaactgcacctattataaagtgatgtttggcataaaaacgacaagctgaaacattaatatcttgtgtttcaagcataagaccaaaaaagcgattctcctttgcccactcaatcgctttatgtaataatgctgttccaacgcctttttgtctatagtcttttgcaacggcaatgtcctctattagtgcatacccattccagttagaacgaatcttaatccggccgatgcagttgttttcaacataatataaaaaaaccgcttttccctcttcttcaacataactaacatccatttcatcatcttcatattgtttaaaataaggtttagaaaatcgttcctcagtatatgtccaaacaccgttttcaaaagcaggtatcattctcccaaaaacaacgaaaggttcatttggtttattgaaatctttcaaattcatttgagtcattttcttgatcatatcaatcccctcctaaacgagattatattagcatactcgtttcgatcgataacagcttccaaaagggcactctttaaaagaacagcatccattaccttttatataagcgatttttctatttcactgtcttaatggggtatttcaacagaggcttgtggtacagtaaaaaggaatagaaacaagagaaaagaagatgaacctatgcccactaacaataaactcaatgagaaatatcatacttccttcaactcgcccacaaccctgttgactagtatccgtggagagaggaagctttgacacagcttctgccattgatgacatctctattgaagtatccaaaggacaaccaaggatcgctatttgactttttcaagaagaaagtagagtgaataaaggagtgattgagtatgttaacaagagaagatatctttaaacacgtcaaagaaaaatacggtacatcgcctgattacccgtgggagaaatacccaaactatgcttctttgagacatacatcaaacaaaaaatggtacggtcttatcatgaatgttctcccagaaaaattaggcttggatggtcatggcgaaatagatattctaaatctaaaatgtccccctgacataagtgatagcttaagaaacggggaaaatatcttacccggatatcatatggataaggaacattggatttcaattgttttagaacggacagatccagaaggcgaaatctataacttaatcgagcagagctttcatttaaccaagtgaagataaagagtgttccggctaatcaagctgcgaagagtagtgggcactttcattttaggatactgttcttcactcagtccataaacgcaacttagtctatctggtgcgagagtgggagaagaatttctaccaacttcttatggaaaaggatgaatagttatgacaaataacttaaaacagagaagaatcattttagatttagcagttactttagatggttttattgaagggaaaaatggagaagttgattggtgcattatggaccctgatatggggtttactgatttcttaaatcaaattgatactattttatatggcagaaaaagctacgatttatggggacaatatattccaaaagatgaagaccctgatacagaaaaggaaatttgggaattggttcatagtaaaaagaaatatgttttttccagaacacaaaatgagattgataatcaagccatatttataaatgataatattcttgaagaaggaaataaattgaagaaaaagtctggcaaagacatctggctatatggtggagcgagtctcattacaacttttataaatttggggcttgttgatgaatttagattatctattcaccctgttgttttgggagaaggaaaaccgttgtttattgatgtaaaacagaggataaatttaaaaatggtgaatacaagaacattttcctctggcgttgtgcaaatcgtttatcattggaatggctaacattgtaaagtaacactcgacagtaatccttcttattgaactaaaggggaatccataaataatgggttccccttaatatactatggaactatcaatatcaaattttctgtaataaaagaggattgaaaaggacggtgtctcctccattaacatcattaagcattatagtatattttcttctccctcttttaagtaaatcggctaagttttgtgtttataaaaaaacgaaagaaggtgatcctatgcccaataacaataaatccaatagattaatcgctgagaagtctacttattttacttcaacatgctcataaccctgtggactggttcccttggggagaagaagcatatgaaaaagcgaaacgcgaaaacaagcctgttctcgtatctattgggtatagctaacgatggctaatctaaagaacatgctattgatgccatgtttattcattttacaaaaaaggatcaaccttgaattactttcacaagattgatcctttcactcatttagccatgtctccgcgaacgtttatatacattcaagattactagccaacaaataacaatgattcctgcaaaaagtatgagcatattgctatacaaataggtagagtgatcaacgtcaataggcagcagcctatgatctaggaagccgatagataataaaccgcctacaatcgcaatacccgttccctctgataaaaagctcgtgaaattaagcaaactcattccagcgcccgcttccttttctttcaaactgctagacacaactgtagatataactgtttttgtgaaagatagccccccaaaaacaaaaattactataattgtcatgatccatggtgctgcatctataaaaaaggcagcgattaaaaagccggaagaaagcaatgcacttccaatagttagtacatacaaggaacctttccgatcaacaagcaatcccccaatgtaaccaaagatgatgacactcattgttccggggaaaataatgccgcttccaattgctgcagtacttaaatggtgaacatctttcatcatgtaaggaaccatagagacaaatcctgctactgtaccaaatattagtcctccgcaaagggttccaatcacaaaaaagacgtttttccctaattcagggtcaacaaaagggtcctgagctttcctaatgtgttgcacaaatatgaagaaagcaaggatactgatgatcagaaaagaaaatctataagatgttgtaaacagcataaaaaatacgatacctgcagacatcaatataatccctgccatatcaatgtgtcctcttattctctcttcctttttcaacaattttataaggaatggaacggtgataattgttgcagttggaataagcagcaaatacgaccaatggatataatgagcaaccattccgccaatagctggcccaacaccttctcccattgctaccagggacccgatcaggccaaatgctttccccctgttctcttttggaatatagcgcgcaacgacaaccatcacaagagctgggaatgcggctgcaccaattccttgaataaatcgggctagaatgagaataggaaagaaagagtgtccaacaaatccaatgatcgaccctaagccatttaccataatcccaaatagaagcagatttttgatgcccagctggtctgatagctttccatatagagctgttccaatggagaaggttaacataaaggctgtattcacccagtttgcacttgctggcagtttattaaactcgttggcaatatcaggtaatgagacgttcagaaccatttcatttaatacgctgaaaaatgatagaacacaaagccaaatcaaaacttgattgtgccgtaaagttgactgtgaataagacgtattcacaatttcccctccattaatgagggcagacgcagtttatagggtcattgatacgcttccctcttttaattgtaccctgttcattttattgcacttcataataactccccctacatttgattgatatgatcttattatatatagactaaggattaaacttttactttttttataaaaatttgaccagattgcgaaacaaggaaaaacgttattcgcatttatctcaagtggcaaaatgaaacattagtttatattttcacatcacaattatcgataagcagtcagttattgtatttgtttaggataactgtggtaacctgaatataaccaacttaggaagaaggtgatcccatgccaaataaaagtaaacccaatagattaatcgctgaaaagtctccttatttactccaacacgcccacaaccctgtggactggttcccgtggggagaagaagcatttgcaaaagcaaaacgcgaaaacaagccggttctggtcagcatcggttattcgacgacttgtcattggtggcctaggataatcaaatcgtgtggaactccattaaaagataacagaagccattttaaacgataatactatttgttcaaacaatacagtctaccttttatttcattcattttctaaaacctgtaatccgtaaccacgcggtagcaggtttttttatttgcttgacttagagttaactctaaattgtaaactaactttaattaaatgagagggatgatgttgttgtattccattagtaaagctgctgagaagactagtattagttcgtatacattaagatattacgaaaagattgggttacttccaccaccaaaacgaaaaaacagtggaaggcgtttttatacggagactgatattcagttcatgttattcctgaaaagtttaaaggaaacaggtatgtctttggaggatattaatgagtttgtcaaagacggatgcattttggaaaaaatcaattcggatgttaaatcggcacaactctccccatctataaataaacgtattgagattttaaccaagcacttagagaaaatggaaattaaaaaaagggagctggaagaagtgatttctactacaaaaggaaaactggatacatatttttcaattttgaaagaggaagtggaaaacaaatgaaacatttaaatatatacataatgttacttggcttctctattttcacgggagctacttttaatcttgcaaaatatacagttggatatttttctccatcgtcttctgcggcatggcgtttcggtttagcggctgcagtgatgctcatcattttgatttttactgaaggtataaagaagagtcaattacggaaaaacgccgtttcatacattattcttggaattataggaatctttggatttaatgccttgttttttgttggtttaaaatatacatctcccgttaacggagcattaataatggggctgaatcctttattaacagcaattctcgctcgaattatcttaaaggacaacatgacaaaaaaacaagtactcggcatattctttgcattcatcggtgtattgttagtcattacacaaggttctatcgaaaccattaaaaccttatcaatttcaggaggagacttaataatctttacaggtaacgtttgttgggcactttatggcgtacttggacgtcggtttgtaaaggatggtacaccgctatctacaaccacttatacgatggttattggtgctgttagtttaatagtagtttccttatttacatccaaacctgtttctttatcgaacatcccgattggagtttggggggcaattgcttttatggctttctttacaagtgttttgggttacctatggtggaatcaggggattaaagagattggggctagtaaaacatctttatttttcaaccttgttcccgttgtaacgatgattatttcatttgccgttggaacaccaataaaggtatttcaagttattggggctgtgctagttatattaggcgttttaaccgcttcgggggtaatacgtattcctaagtacaatactaaagaacagtcagctatataaagaaatagggagtatttttgagaaaatgtgttaagttaaatatacactaattataggaagaaggtgatcccatgccaaacaaaagtaaacccaatagattaatcaatgagaaatcaccatatttactccaacacgcccacaaccctgtggactggttcccgtggggagaagaagcttttgaaaaagcaaaacgcgaaaacaagccggttctggtcagcatcggttattcgacttgtcattggtgccacgttatggctcacgaaagctttgaagacgaagaaatcgcgcgtcttctcaatgaacggtttgtggcgattaaagtcgaccgggaagagcggccggatgtggattctgtttatatgagaatctgccagctgatgaccgggcagggcggctggccgctgaatgtgtttatcacgcctgatcagaagccgttttacgcgggtacatattttccaaagacgagcaaattcaatcgtcccggttttgttgatgtgcttgagcatctgtctgagacgtttgcgaacgaccgtgagcatgtcgaggatattgcggagaacgccgctaaacatttgcagaccaaaacagccgccaaatcaggcgaaggccttagcgagtcagcgatttcccggacattccagcagcttgccagcgggtttgatacgatctacggcggtttcgggcaggcaccgaaatttccgatgccccatatgctgatgtatttgcttcgttatcatcacaatacggggcaggataacgctttatacaacgtgacgaaaacgctggacagcatggcgaatggcggcatttacgatcatatcggctatgggttcgcccgctattcgaccgatgacgagtggctcgttccccactttgaaaaaatgctgtacgacaatgcgctgctgctgactgcttatacagaagcctatcaggtcacgcaaaacagccgctataaagagatttgtgaacagatcattacgttcattcagagggaaatgactcatgaagacggaagctttttctctgctttagacgcggatacagaaggagaagaaggaaagtactacgtgtggtcaaaggaagaaattctgaaaacgctcggggacgatctcggaacgctgtattgccaagtgtatgacatcactgaagaaggaaactttgaaggcaaaaatattcctaacctcattcacacaaagtgggaacaaatcaaagccgatgccgggttaaccgaaaaagagctcagtctcaaactcgaagacgcaagacagcagctcttgaagacacgcgaggaaagaacctatccgcatgtcgatgataaagtgctcacctcatggaacgcgctgatgatcgcgggtcttgcgaaagcggcaaaggtataccaggagccgaaatatctcagcctagcgaaagacgccatcacatttattgaaaacaaattaatcatcgacggccgtgtgatggtccgatatcgtgatggcgaagtgaaaaacaaaggctttatcgacgattacgcttttctcctatgggcttatctggatctctatgaagcttcgtttgatctatcttttttacaaaaagcgaagaaactgacagacgatatgatcagcttattttgggatgaggagcatggcggattctacttcaccggacacgatgctgaggccttaatcgtccgggaaaaagaagtgtacgacggcgccgtgccttcaggaaacagtgtggcagctgttcagctgctgcgtcttggacaagtcacaggcgacttatcactgatcgaaaaagcggaaacaatgttttccgtgttcaagccagacatcgacgcgtatccgagcggccatgctttctttatgcaaagtgtgttaaggcatctgatgcctaaaaaagaaatcgtgatttttggaagtgcagacgatccagccagaaaacaaatcataacggagcttcaaaaagcctttaagcctaacgactccattctggtggcagagcagcccgagcaatgcaaagacattgcgccatttgcagcagactaccgcatcatagacggcaaaacaaccgtgtatatttgtgaaaacttcgcctgccagcagccgacaacgaatatcgaagaagccatccaaacgttaataagcagcagggattaagacccttgctgcttactttttgatttcttatggtaccataaagcgatccccgcaaacacaagattgaccgctatcgtaaagaaagcctcccacatcgggttcccccgcgtaaccgtaaagagagaaggaattcctccatacacactgtttttttctgtaataaacatacacaaaaacatattattcgcggcatgggcgccaagtgatatttcgatgcttccagttttaatcgtgtaataggtccacacaaaaccaaatgttaaatactcaattcctgcccagacagcgccattgttcatttctggattcgcaaaatgcaatacgccaaacaatcctccgacaatcagtgtcaaaaatagaggatttttcgtcaatctcccgaaagcttgaagcaaaaatcccctgaaaaacagttcctcagctgatgtctgaatcggaaccaaaatgagggcagccgctagcagccagataaagcgtgaggcattaaactcttgcattgaatagctatcaggatgaatcgcaaaatcaatcaattgtacggcgatcatcagcaagaaataagcaataaagccaaaggaaattctccgccaattcatctttgaatttggtgtaatcacagttcggaaaggccgcttcaaaataaagcgcacagccagccaaactcccggaatggcgaataaataaatcacatgggacaaataaagatctacgaggggatcactcagcacagcttcatccaaatcaaacgtgatattgggattcacaataaccgtgaacagtatagcgaaaaggtaagctatattcccgaatacatataaccctaccatcaccaaaaaagcgaaaaaatatctccacaacgtattgtttccttctataggacggataaatgaattcattccttctatgtctcttcctttcaatgagaatattactatatatttgcataaattggtctatgaatctactgttttggaaatcttttaagcaaaattaaaatataaagtgtgaatttagttcttccatctagtgatttgaactctgttgccaatgaaccaagatacttataatagtcctaagaggggaattttcagtcttttcttactactcaaaagggggttttttatgaatacgatcttcaaacaaaagaatacacatcctttctcaaacgcagcgaatcgtttagaccgccttccgatttcacgcgttcatttccaagtgttaaccgctctcggcattgtttatttctttgatctcgcagatttatttaccctcagcaatgtagcgccggcactgatcgagcattggggcatcccgctttcaactattgctaacgtaacggctgcttcgtttttaggcatgtttttaggcgcttcactgggcggacggctgtccgatcgaatcggccgcaaaaaagccttaaatctatttgtctttgttttttcaatcgcatcgctatgcaatgctgcggcatgggacattccatctttaatgacattccgttttctcaccggatttggcgttgcagccgccatggtcattacgaatagctatttggcggaatttttcccttcaagtgtacgtggaaaatatatttctttttgtgccatgattggattgatcggggttccgatcaccaacattgtgtctgcctttgtcattcctcttggttcatggggatggaggctagtatttgtatggggtgccgtcggccttatttattttttctttattcgacggctggaagagtcgcctcgctggcacgaaaatcgcggggaatatgcgaaagccgatgcgatcctcaaccgaattgaggcacaggttgaaaaggagaaaggcccgcttccggcagcatcccagcctaaagtaagcgaaactgttaagcagcatgcaggttacgccggcttattgaaaggcagaaacctcaaaatcaccatcgtattatctgctgtatggatttttgaaacgtttgggttttacggatttgcctcatgggttccaagcctgttaaaaagcaatggtgtcaccatggaaaatacattgtggtataacgtattgcattccgtcggcgctccgcttggcgcactgctcggctccatgatttctgaaagatttcaaagaaaatggattttagctgcgagtgcgtttctgacggccatcgccgggctcttatatggtatgacttttattcccatcatgatcattgtctttggttttatcgtgaatatcacagaacgggtctttacctcgaacttatacgcctatacatctgaaccttatccgactgaataccgctcgtctggcagcggtttagcctatggtcttggccgtttttcaaacatttttggctcattgcttgtcggatttattgccgttcagctcggctatatcagcgtcttcttatttattgggggctgctggctcgcatgctccttgctgttaatcttcttcggtcctaatacgaatgcgaaacagatttaaaaaagtcagtgcggatctgccgcactgatctcattacaattgcttcaaaatcctcgcggggtttccgcctacaacagtattagcgggtacatccttagtgacaacagatccagaagcaatcactgcgttatcaccgattgtcactcccgggttaatcaccgcccggcctccaatccaaacttgatctccaattgtcacaggcttaccgaactccttcccggatttcctttcgatcggatcaagaggatgaccggccgtgtagatatgtacacctggcgcaatcaaacaatgacggccgatacgcacctcacacacatctaaaatgacacagtcaaaattaacaaatgtatgatctccgatatgaatgtgatagccataatcacagcggaatgtcggcaaaatcgtgacttgatccccaaccgaaccgagcagctccttcaaaagctctgtccgcactatatcatcttccggtgtttcgttatattgtctaatcagctgtctcgcatgcttgcgttctagtaatagttgttgatcttccgaattgtataattctccggctgccattttttctttttctgtcctcagcatttaagtcactccatgtcagattgtaatctcgatcaaatttccttcatcatcctcaatcacactttcatagtagccgtctcctgttgtccgcgggccgttgacgacggcaaaaccatccgccttcaaccgagcagtcagttcatccactttctcccggctcccaacggaaaaggcaatatgtgcccagcctgtcattgtttgtgagggcggatcggtcacatttccttttttcataatctccagccttgctccggaaccaaacgtaataaaataagacttaaaatcttttttctcattatgatacaaatcattcgcttcgccattaaaatacgattcataaaaagacttcattcgctctaaatcattgacccagaccgctgtatgttcaatctgcatttcttcctcctccttcgccttcaatgaagttataaggtatgaaatgcatttcagttcaagcttttttcttaaatttatgctgaattttgatatcagcgggttcatcctgcaaaaatagagaaaatgctgcgatgccgagctgctcaagattcaaatcaagcgacggaaaaccaagaacacggctgatagaagtatttccctcgcctatgatttcaacatcccaattactctttttggcaaatagatgaattccagctgccacttcatcactatttgcataaatagcagtcggaaccctcccgctcatataaaaatgttcagctgcccgctcaccatcattcatatcgttgcatccggacagcatatggcggtcttccaaccttccgcagacagctttataggccgcagctttatcagccgtgctcgggctcctatcagcttctctgacacacgtaaaagcaatattctcatgcccgcggccctttaaatagcgaaagctctctgcataagcagcttttctgtcattaaaagcacaaggaacatcaatgtctccggtatcctcacaagcgatgatcggcccatattcctgataagctaaaatgctgtcccaatgattggcgcgggaagtaatgatgagaccgtctattttcttcgttcttaacagctctaaatatttgatttcaatatcggggttataattggtggggagaagggtcgttgcatactcatactgaaaagccgccttggtgattccgttaacgattttatcaaagcagggatgatcgctataaggcagaatcacaccgaccgtatgggttttcccgcgaatgagatcgattgcggttcgatttggcgtataatccaattccttcatgacttgatgaacaagctttctcttttcttcagatacataaggatggtgattcaatacacgcgagacagtcgaaacagatacatttgccagtcttgcgatctcttttatatttgccatctctttctccttttcatataaaaaaagcagtaagtgtaaaatccttactgctatctcatcatatattgatgataagttcaacaggacaatggtcggaacccatgacgtccgctgatatgcaggcatcttcaatctgttccttaagtctttcagaaacaacaaaataatcaatccgccatccgatatttctgtcccgggcgccggcacgatacgaccaccaggaataagcgccttcaagatcaggataaacatgacggaaagaatcaacaaagccagcttctaagaaacgagtgaatgcccctctttcttgatctgaaaatccagcgttattccggttcacctttggatttttcaaatcaatctcctgatgggctacattcaaatcaccgcataaaatcactggttttttctgatccaattcaagaatataagacaataaagcctcttcccattgcatgcggtaatcaatccgctctaatccccttctggaattgggcgtataaacagtcatcacatacacgttttcaaattccagcgtaatcactctgccttcttggtcatgctcttctactccgataccgtagatgacctgcagcggttcttgcttagaaaaaacagctgtgccggaatatccttttttcactgcataattccagtacacatgatagccttcaggctggagatcaacctggccgtcctgtatcttcgtttcctgaagacatataatatctgcatcctcttctttcaaataagagaggaaatccatttttctcatcacagcccgcaggccgtttacattccatgaaatcaacttcatgtttcatcctcccccctataaaaaagagcaagaacccgaaggtccttgctctttacgcatcagcttactcaccgcttacgtatggaagtaaagccatttgacgtgcgcgtttgatcgctgcagtcaatttacgttggtatttagcgtttgttccagttacacgacgtggtaaaattttaccgcgctcagaaacaaactttttaagaagatctacatctttgtagtcgatgtgcgtgataccgttagaagtgaaataacacactttacggcgtttcgcacgaccgcctctgcgtcctcctgccattgtcatttccctcctttctttttcattttaggcgataatcacattagaatggaagatcatcatccgagatgtcaatcggtttgccgtcgttggcaaatgggtcatcattaaagctgttcccctgattgcgtctctggttgttttgatttcccccaaatggattatcattttggcctccgccaaagtactggcctccgccgctgtttccttcgttgtatccacctgaaccagaaccgccgccgtttttcggctcaagaaattgaacactttcagcttggacctctgtcacgaagacacgctgtccttgctggttttcatagtttcttgtttgtaaacggccatctacgcctgcaaggcttccttttttcaagaagtttgcaacgttttcggcttgtcttctccaagtgacacaattaatgaaatcggcctcacgttctccggactggttcgtaaatgtacgattcacagcaagagtaaacgtagcaacagccgcaccgtttggcgtataacgaagctctgggtcttttgtcagtcttccgactaatacaactcggttaagcataagaaagaccaccttttaccattatatatttcaaaattgcttattcttcttctttaacaacaatgtggcgaatgatatcgtcactgatcttagctagacggtcaaattcttgaactgccgcagcgtcagattgaacgtttacgatttggtagaaaccgtcgcggaaatcgttgatttcgtaagcaagacgacgtttaccccaatcctttgttccagtgatctccgcaccgttagaagtcagaacgttgttgaaacgctcgataactgcttttttagactcttcgtcaatgtttgggcggataatgtacataacttcgtactttctcatctgtttgcacctccttttggactaagcggcccataatgggcaaggagcaataattctattactcacaattttatattataccaaagctcttgtccctttacaactgcatcctatacattaaatcggaaatgaataacatctccgtcttggaccacatattctttcccttcaaggcggacttttcctgcctctttagctcctgccataccgccgcccgcaagaagatcctcataagcaactgtctcagcacgaatgaagccccgctcaaagtcactatgaataattcctgcacactcaggtgctttcatgccttttttgaatgtccaagctctgacttcctgttctccggctgtgaaatatgttgcgaggccgagaagagagtaagacgctttgatcagctgatcaagacctgattcttgaatgcccagctcttccaagaacatttgcttttcttcgccttcaagctcagcgatttcagattcgatttttgcacatacaacgataacttctgcgttttcgccggcagcgtactcgcgaatcttcgctacattttcattgccagatggatcagcaacttcatcttcacttacgttggccacgtacaaaataggcttcgaagtcagtaaatggagctgcttcacaagcttttgctgctcctcagtgaattctacagatcgagcaggcttttcactctcaaacgcttctttcagtttagataaaatctcaaactcaaatacagcgtctttatctttttgcttcgcaagcttgctgacgcgtgtaatccgcttttcaaccgtttccatatcagcgaggatcagctcaaggttgatcgtttcaatgtcatcaatcggatcaacctttccggaaacgtgtgtaatgttgtcatcggaaaaagcacggacaacgtggcaaatcgcgtcaacttggcgaatatgagataggaacttgttgccgagtccttctcctttagatgcgccctttacaatccctgcaatatcagtgaattcaaaagcagtcggcacagtcttcttcgggttgaccagctcagtcagcttttgcagacgatcatccggcacctctacaattcccacgttcggatcaattgtacagaacgggtagttggctgattcggcaccggcctgtgtaattgcgttaaatagtgttgattttccgacgttcggcaaaccaacaattccagctgttaaagccattctttcatctcctctatataaaaccgtcattgtatgaacgtattttgaacctagagcaattataaggaggttcactggaaaagacaagctgacaaaaaagcattttcagcctgccaatccctttgattatgcttttttcaagcctactaaacagtcaaaaagcgtacttcccattccattatcagaatttgtatcatttgtcagtgcattgactgaccctccaaaagccgcccacatgccttcatctatattaatcgtcttcgcatgagcctgcttcatcactttcaccttgcccttcaagcgtccgcggtcattaaagataacaacttcgtctccattctgaagatcctgctcagccgctatatctggagaaatatcgacctgaacgtgctgaagcttttcaataaacggcacatgctgtgaatggttggaacgctgcggatgaatggataacagcgtataagggtacttttcagctaactcctcattatggaaaacagattcttcgggcacatttaattgaagcgagccgctaaatcctttttgctcagctagcgacgaagtaaattcaaattttccactcggcgtcaaaaactgataatcatcccacggcacctgttttactggaagagggaggtggcctttttcttttaaacgctcaagtgtcacatcctctgcttccaatgaagaaagccccatctctaaaaattcttgagtgctgtattcaaacagctcgccaaatccaaggcgttttgcaagctctgaccagatccagctgtccgacttcgcttcaccctgcggctccacaagcttcttcccgtactgaacataatgatgatacatactggaatagtagatatcttcttcttcaaaaacagtggcagtcggcaaaacataatcacacagctttgcggtatctgtcataatggaatcaatcgcaaccgtcatgggaaccttttcaaaagcttgtctcaccttatttgtattcggcacctgagtcagcggatttccgcacgtcacaataatcatctcaatcgcaggatcagcagcggtcaacacttcttcagcctgcgtcatcattgaaaaagaacgtgatgttgtttttaattccggcaacgtcagctttgtttttgcaaagctctcgccaatctggacatttccgaaattcgcgccgccgcccttaattccgacatttccgcttgccgcaacgagtgcatcaatccaacgaatcgttcccccgccgtttttatatcgctgcatgccaagccccataaaagtagacaccggaccatcagcatacaaaccggccagatactccagctcctccatagaagtttctgttttcacaataaactcttccagagaaacagttttcaaaagctctttcacatcatcaaaaccgacagaatgctcagaaataaacgtttcatccgttcttcccgtctcaatcagaaccttcaaaacggctgccgcaagccagccgtccattccaggctttacagagatatagcggtcagcaagcttagcagtcgggttgaagatcggatcaatcaccgtaatcgtggcgcccttctttttcacctgctgcaagtgatggtataagtgcatatttgttctggatacatttcttccccacacaacaacatgcttgctgttgtaaatatcaagcgggccgtgaccgtacgaacggccaaaatcccagctttgcgcctcgatgccggagccccagcatatgcttccgacgatttcagtcacgcctccatatccattaaaaaaacgctgatcaagcgcttttaacagaccgttattcgcataatcatggctgtgcaaaacagcagtcgtctccgacgtttccttgatttcccgaagtttatcggcaatttcatcaagtgcctgctcccaagaaatccgcacaaactcgccattttgttttttcattggatagcgaagccgatcaggcgaatttgtttttgtctcaagcattctgccgcggccgcagattttaccttccgtaatcggatggtttggatctccgtccacttttgttacctttccatcaacaacagtcaccaaaaagccgcagctgtcccaacaattcagcggacatgccgactgatgcactttgctcatcgccgtcttctccttaccttctatatgaaaaagcatgagtgtcggcctatttatgaagtaggctcctcatgcttgactagtactttttttagttttctttcaaattctcttctcggaatcataacactgtgagagcatccctcacacttaattcgaatatccattcccatgcgtataattttccagctgttcgctccgcatggatgcggttttttcatttctacgatatcattcaggccaaagtctttatccgccaagacccttcacctcttttcctaaactgctgtatctattgtacaaaaaaactgatcataagagcaatcaagatacccgaaaagaaatacatcctcttatttccatttactcaaaataggatataagagcagacaaactaacaaatacaaattgagcatcccatatatcggatacaagaacgcgatcaaatcagaaaatccgaaagaagtaaaaggcaccattaacactaacaaaatcaacacaatcacccatctcggcatatgaataaacgccatcagccggctggacagccccagcaaaccagctaccgtcgtcgtgtaaatcgccaggcacagcaccgccgtcatacataaaaaaaggaaataaggcgcaccctccagaacggcaaacagcggtatttcaaactgagaaagggagcccgccagctccaccaacgtttcattataaacaaatgagatcacgccaaaaataagaccgcttgccacacttgcgatttttgcttctccgagccctttcatctctttcccaacagaggataaaatcgcaacaactgaaaggatgtttaaagaggtaaacgtaatgctcgcaggccagttatactgctgggacaaatcaatcgtccacgtatggtgatgtgtgctctgaaaggagatcagcgcatataaaagccccgctactaacacaggaatcaaaatactatttatagataatattcctttcacatcccacaaaaacaaacacactgtcacgatgcaaatcagcgtgattccccaccagaaaggaagcttgtacatttgcagggtcacaccgcctccggcaatcatcaccatagtcgtcgaaaacaaataaaaaatgatgaggacatcataaattttcgccagccatggccccattaaatgctccagaaccggcagaaaatgagtggattgaactttaaaactgattttcatcacaatataagacgagaaaatgaacatgattgtaaacagcacaatagcaagtccgctttccgccccaaaaaactgccatatctcctgaccgctcgcataaccggccccgatcaggctccctaatatgagcagcatccacttcattccggctctccacaacactatcacctcatagacaaagttcagcttgtttccgttattgttactatataaataaaagaaagcaaacatgccatattttcatagacatttaaatacaaggtgaaattatcatacgaaatacacataaaaaaagactgctaatggaggcagtctaaaaatatatcatcttgcagtggaatgaaggaatgaacctcattaaccattcctatctataaagtgttttgtaagcaaaccgtagcttgatcatgatcgaggcaatgggggacaatatttataattcacccactaaccattcataataacctctacttttttaaaatctccggtgtcatacacaaagcataaaaaaccgtactgctggatatactgtaaacaaccttacataacgaaacacacaccatagcaattctgttacctactataacaaggaagtgaaacctatgaatcgaaaaggcgggcttttttcctctcaggaacgagtaaaacaatatgtttcacatacagatgcagctgcagcaaaacaaatccaaaccattctttcttcatccttacgtaaagctgccggcaaaccaattgttgtggtttgtatcggaacagaccgttcaaccggtgattcattgggcccactcgtaggaatgaaactcaaacagatgcagctcaccagattccatgtctacggaaccttatctgaccccgtccatgctgtgaacatgaaggataaaatcaatgacattcataaattacataaaaacccatttgttatagcggtcgatgcatgcttaggccgcgttaagagtgtgggttcatttcaaatcggggacgggccattaaagcccggagccggtgtacaaaaagaccttcctgaagtgggagatcttcatattaacggaatcgtgaatgttagcggtttcatggaatattttgtattgcaaaatacaagactcaacttggtcatgaatatggccaatgttctcgcggaaggattgagtttaacagatcggacagagtggaggcaagaacgccttaacccgttgcaaaggctcactgggcgcatataaaacaaaaaccatcttcgcttgaaagatggtttcttcatttacgattctcgttcagataaaagctctaaaatccggtcaaggtcttcattagagaaaaattcaatttcgattttgccttttttcttctgtcttttaatattaactgttgttccaaaataattttggaggtaggattcccgttcttttagaaccgcatctttcacaggttcttttttctttgtttcacgtggaacattctgattcaactgctgaatcagctgctcaagctggcgaacattgagctgctccgcaatcactttttgtaccagcggttcaagcttatttttgttttttaagccaagaagcgtgcgtccatgtcccatagaaagcgtaccttcggcaataagctgctgaatattttctggcagtgtcagcagtcttaaatgattcgcaatatgcggtctgcttttcccaagacgtttggcaagctgctcttgtgtgagatctaagtgtttcaacaaggaatcatatgcctgagcctcttcaagcggagataaatcttcacgctgaaggttttctaataaagcaatttccctcattaacgcctctgataattcacggacaatggccggaactgtatctaaacctgccagctttgccgctcgaaaacgccgttcacccgcaacaatatcatagccttttaaagattttctgacgataagcggctgaagaatgccatgctgcaacacagattcttttagttcagctaatgcctcgtcatcaaagtgttttcttggctgataaggattagggcgtaaatcggcaattttaatttcttcaactgtctcttcagacaaatctacctgattaaataacgcattaatcccttttccaaggcctttagccattcgcagccacttcctttgctaaatctaaatatacttccgcacctcttgaccgcggatcgtataaaatgatgggttttccgtgactcggtgcctcactcagacggacattacgcggaataactgtcttatatactttatccctaaaatactttttaacctcttcaatcacttgaatgccaaggtttgtccgggcatcaagcattgtcagcaatacaccttcaatcattaaatcagtattcaaatgcttttgcacaaggcgtactgtatttaataactggctgagaccctccaaggcataatattcgcactgtacaggaatcacaacggaatccgaggcagtaagggcattaatcgtcagcaagcccaatgacggcggacaatcaatgataatataatcataattttgctttactgcttcaagcgctctcttcaatctcacttctcttgatattgtaggaaccagctcgatctcagcccctgcaagctgaatcgtcgcaggaatcacatccaagttctctactgtcgttgctttaataatatctattacatctgcatcatctactaaaatatcgtacacacactgctctacatcggctttttcaatccctaatccgcttgtcgcatttccctgcggatcaatatctaccagcagaacccttttccctatgtaagccaaacatgccccaaggttgacagacgtcgttgttttgccgaccccgcctttttggttcgtaattgctatgatttttcccacgatgtcacctactttcacatgaacatgtactatcttgcttctattctatcaaaaaaagattaaagcgtttcatttttttcatcattttgttccgaatcagaagggaaataattgaaaattcaagcacgctttatgctttctcttataaattctgcaatttctatgtttttttgacttaaaaaaggaatttcttaaagaaaaaaagaagaagtcacggtacagaacgtggaaacaggatggtgagaaaatgatttatcaaacgaagagagatgtacccgttacgctgatgattgtgtttctcatattactgatacaagcagatgctattgttccttttgtgctgggaaatatgagagtttccggctggatcatttttattctgctgactcttttaaatggactcatcatttggagctttattgacctaaaatatgtattgaaggaacaccatctgatcattaaagccggattgatcaaacatcaaattccttatgaaaacatcgataaagtcgttcaaaaaaagaaactgtggtccggttttcgtctgatcggctctcgccatgccatcacaatatattatcaggggggatggggacatgcagtgatttcaccgcaaaaatctgaagaatttatccccaagctcaaagaaaagaattctaatataataatattcactaaaagtaagtgattaccttttatttaaaatataaaaagctctcctgcttttcaggagagcttctattttggtatgcgaatcgttaattgaatatattcttcaaattcttcttcttccgtattcaattttacaccgctgtcttccaccattgatagtgactggcgaatcgtgttcatcgcaattcttgtatctctgctgaatgctttgcgtctcggctttggctttctcttgccttgctccagcattttcaccacgcggtcttccgtctgctttacatttaaacttttctcaataatctctgtgagcagtgtgacttggagctcaggctgtttcagcggaatcagtgctctggcatggcgctcggtgattttcttctccataattgcctcttggaccggctgaggcagctttaataaccgaagcttattcgcgattgtagactgcccttttcctaagcgctgtgcgagtgcctcctgtgttaaatcatgcagctcaagtagcctagcataagcatgcgcttcctcaatagaagacagttcttcccgctgcaagttttcaattaacgccacagaagcggtttccgtgtcggaaaaatccttaataattgccggaatcttttcccactcaagcgattgcaccgctctccagcgtctttcacctgcaatgagttcgtattggccttcttcttctgtatgcctaacaacaatcggctgaataatgccgtgtgtatgaatggtcattgctaactctttgattttttcatctgagaaaatggtgcgtggctgaaaacggttgggaacgatagcatttaccggtatttccagaatctcttctttgtttgtatcatgttcagcaatctccggctccggttccttctcaccaagcccgaagaaacgagagaatgaatgcttcatgtacctacaccacctttaaaaactgccatttttataattctattttctcatggtttttcctgctgtacatccatcaattttgatgaaaatatgatggtattgtcatatcaggctgtctaaattacccttcaattggcgatttattaggagttcccggttttcttggatacttcttaggtgtattttttattttgcgtatcaccataatattacgatcgctttcttcaataggcagcttaaaagaatggatattctcaagttctcctccaagcgtcgtgattgcttttttgcctgcattcagttcttcttcagctgatgcggcttttaaagcaacaaataaaccgtttttcttcaccagaggcaagcaaagctcactcaaaacagataatctcgcaactgctcgcgctgtcacaatatcatagctttcacgcacgtctttccgttgcccgaacgtttcagctctgtcatggcagaatgttgtattctccaattgcaaagcctcagatagcttttctaaaaacgtgatccgtttattcagtgaatccacgattgtgacattgaggtgcggaaagcatatttttatcggcagacttggaaaacccgctcccgctccgacatcacaaatcgtgttcacctgattgaagtcgacataaaaagtagctgtaatggaatcataaaaatgctttaaatacacttcttttttctctgttattgaagtcagattgattttttcgttccattcaaccagcatgtcgtaatacagctcaaattgctccagctgacggggagaaagggagatccctttttccgccaaaccagaagtgaattcttcaatattcatgccgtcatcctttctattcggctatcttcgcaatgcgtccctgctctaaatacaccaatagaattgaaatgtccgccgggtttacaccggaaatgcgggaagcttgggcaacagacaaaggccgtacatttttcagtttttgacgcgcctcggtcgcaatccccttaattgcgtcataatcaattcgatctggaatttttttattttccatcttcttcagtttttccacttgctgaagagatttttcaatatatccttcatatttcacttggatttctacttgttctgccacgtcttgaggaactggcacttctggcggcgccagttttgtgactgtttcatagttcatttcaggacgcttcatcaagtctgtgccgcgaactccatctttcaattcgcttccgccaagagaacggatatattcttgattttccggagacggcttgataattacagaatgaagacgttttttctccgcctcgatcgccgcttttttcttctcaaaagccgcatagcgctcatcagaaatcaatccaatgcgatgtccgatttctgtcagacgcaaatcagcattgtcatggcgaagaagcaatctgtattccgcacgtgatgtcaaaagacgatatggctcattggttccttttgtcacaaggtcatcaatcagaacaccaatataggcgtcagaacggcttaaaatcacttcttcttttccaagcgcttttcgtcctgcattgattcccgccataatcccttgtcccgcagcttcttcataaccggaagttccgttaatttggcctgcagtgtaaaggtttgtgattttttttgtttcaagtgtcggccagagctgtgtcggtacgattgcatcatactcgatcgcatagccggctctcatcatttgcacgttttcaagtccaggaatcgttgcaagcattctttgctgtacgtcttctggaagacttgtagataaaccttggacatagacttcctgtgtatttctgccttccggctcaaggaagatttggtgacgcggtttatcattaaaacggacaactttgtcttcaatggatgggcagtatcttgggcccgtacctttgatcataccggaatacatcggtgaacggtgcaggttgctgtcaataatctcatgtgtctcagggcttgtatatgtcagccagcaagggagctgatctgtgatatattccactgtttcatatgagaaagcgcgaggcacatcgtcaccaggctgaatttccgttttgctgtaatcaatcgtgtcgcttttaacgcgaggcggcgtacctgttttaaaacgaacaaggtcaaaaccaagttcctccaaatgctcagaaagcttaatagaaggctgctggttatttgggccgcttgagtaagacagatcgccaagaataatacgtcctcttaaatatgtccctgtcgtcatgacaactgctttcgcacgataatgtgcaccggtttgtgtaataacgcctcggcattcgccgtcttcaacgatcagccgctccacaattccttgcagcaatgttaagtttggttctttttcaagcgtatttttcatttcgtgctgatattggaatttgtctgcttgcgcacgcaatgcacgaaccgcaggaccttttcctgtattcagcattctcatttgaatatgcgttttatcgatgtttcttcccatttctccgccgagcgcgtcaatttcgcggacgacaatcccttttgcggggccgccgacagacggattacatggcataaatgcaaccatatctaggttgatggtcaagacaagcgttttggcgccttggcgtgcagatgcgagggcagcctcaacaccggcatgcccggcgccaatcacaatcacatcgtattggcctgcttcataccccatgattctagttcctccttttattattttcctaaacagaattgtgaaaagagctgatcaattaagctttcgtggacagaatctccaatgatttcccctaaaagctcccagcatcttgtaaggtcaatttgcaccatgtcgatcgggacatcctgttcgatgccgctaagcgcatcttcaatggcgcgttttgcttgctgtaaaatagagatgtgacgtgtgttgctgacataagtcagatcaccgctttcaatggcacccgtgtagaacagtgattgaatcgcttcttccagatcattgatgccttcctcttttaaaagagatgtcgtaacaactggacgtccattggcaagctcacggacacgttcagtgtcaatcttcgcctcaaggtcagtcttattcaaaatcacgataacatccatgccctcaacggcttcaaaaagcttcacgtcttcatcagaaagctcttcactataattaagcacaagtaaaatcaggtccgcttcctttagaacctggcgagaacgttcaacaccgattcgctcaacaatatcctctgtttcacgaatacctgctgtatcaaccagacgaagcgggacgccccttacattcacgtattcctcaatcacatcccgtgtcgttccgggaatatcggttacaatggcttttgcctcatgaacgaggctgttcagaagagatgattttcctacgtttggccggccgataatgacggtagaaagaccttcacgtaagatttttccttgctcagaagtcctcagcagcgtctcaatttcctttttcacggcggttgccttttcgactaaaatctgatgcgtcatttcctctacatcatcatactccggataatcgatattcacctcaacatgggccagtgtttctaaaatctcactgcgcaaacggcgcaccaaagcagaaagacgcccttccatttgattcatagcaacgttcattgcccggtccgttttcgctctgattaagtccataaccgcttccgcctgtgaaagatcgattcggccgtttaaaaacgcacgtttcgtaaattcaccaggctctgccagtctcgctccctctcttaatgcaagctgaagcacttggttcacagtcacaattcccccgtgacagttaatctcaatgacatcttctcgtgtaaaagttctcggtgcttttaacactgataccattacttcctcaacgacacgatccgaaggtctgtctacgatatgaccataatgaatcgtatgtgattcgaccgagctgagtgttttccccttcggtcccttataaattttatctgcgatttgaatggcttctggtccgctcaaccgtacaatcgcaatcgcgccttctcccatcggtgtggaaattgccgcaattgtatccatgttgttcacctctctttacttatacttcatctatataaaaaaatttttattatgccaaaactaaaagataacatagtttggttcgaagtggaagatttgttatccacagaaatagaaattcgtcccttattactttaacttatccacatgtgaataacaattaattttatttcctgaacttcctttttatcaacaggatacacctaaaaagaaaaaacttaaacggcaaaaccttgatattactaggaaaagtagatttttcggatacaaaaaaaccgaaatccaatttttatcggacttcggttttatgctatcttttatgggaaataacgagatgacgattttcgccttcacccattgaatatgttttgatctggtggtttgcatatccagaaagagtatcgtgaataatttttctttcgctggacggcatgggctcaagctggatggattttttcgttttcaaaacctggtcagcaagcttgatggccagctggctcagtgtttcttttcttttcaaacgatagttttctgcatccaccgtcacatttttatattggcctggataacggttaagggcaagctgtgtcaaagtttcaagggcgtttaaggtttgtcctcttttcccaatcaacaatgctgccttttcacctgttatatgatatctcactgtctttttgctttcttgaacagtcacatcagacttcccggcaatggcttcggcaatcgtttgaagatataacttcgcttgctgaatcggatcaatcttttcaaccagctttacgatcgcaggctttttaccgaaaatgccgagaaaccctttgtttccctcttcaataacagtaatttctaccttatccttcgttaatcccagctcttgcaatccggactgtactgcttcatcgacatttcgccctgcagcagtcacattcctcactttttctttcctccggctttttgcggctcaggattttttttaatatcaggtcctttaatgaggaaagtttgcgcaatcataaacaagttaccaactacccaataaagagaaagagccgccgggaagttgatcgcaaatacgataatcataattggcataatccaaagcatcatcgccatttgcggattttgctgcgcattgccagccatcatcagtttttgctgaacaaatgtagcgacaccggcaacgataggaagaatatagtaaggatctttttctcctaagtcaaaccataagaagctatgctctgaaatcgcctgggttctcatgatcgcatgatagaatccaattaaaatcggcatctggatcaaaatcgggaaacatcccgccaatggattgacaccatgcttttggaataaagccattgtttcctgctgaagcttttgctgcgttttttgatcctttgagctgtatttttctttaagcttttgcatttccggctgtaaagcctgcatcgctttcgaacttctcagctgcttaatcatcagcggtaaaattaataaacgaattaaaatggtaactagaattattgaaagcccgtagttatctcccgtcaatttcgctacatacgtaatgagctcagacaatggatatactacgtacttgtcccagaaatgcggactatctgcagtgatcggctctttcacactcgagcatccagccaaaagcatgaatacgccaaccatacttaatagcaaccctattctccttttcaacaacatttcctcctataattaatctttacactcttttattgcaaagcatacttgtatgtattttagcatctttcagttttaaatggtgtctttttctgatcaaccagaaaggaagcgcttttaaaagttgtaagaaagcagtggtgatgcctactttgacgaagatttcttatataatgaagactttctgaatagatgctgcagactttttttcgtttcctcatatgtcagctggctcgccggttttctggcaataatgatgtaatccttttccttcagtctctctttctcctcaagaaaggcctgccgaatcaaacgtttgatccgatttcgcatcacagcattgccaatttttttgctgacggaaagcccgacacgcagttcatcattttcaggctgatcaagcgtatataagacaaactggcggtttgcaactgatgtcccatgtttaaacactttttgaaaatcttcatttttctttaaacgatttcgcttcttcaaatgactcactccgatactggctggcagaaacttttaaaatttattatgaacatgagatgcatctgaaccaggaagcatgccccggttcattacgcatcacatctatcttttcccataacgtgaaaaaagaccactgacattattcagtggcctaagctgataatacttttctgcctttgcggcgacggcgtgctaaaactagacgaccgttttttgaactcatacggcttctgaagccatgaactttgctgcgtttacggttattcggttggaatgttcttttcatttatgacacctccctcgaggaatagctgttaaagacagtcttacttattatatttgcgttacctattcattgtcaacttcactagtgcttttatttcttgcaaccataataggataccataccttttcaactttcgaaaccttattttttagattccttaattttacggaaaaaagacaaattcaaacaatttgcccctaaaatcacgcatgtggatatctttttcggctttttttagtatccacagaggttatcgacaacattttcacattaccaacccctgtggacaaggttttttcaacaggttgtccgctttgtggataagattgtgacaaccattgcaagctctcgtttattttggtattatatttgtgttttaactcttgattactaatcctacctttcctctttatccacaaagtgtggataagttgtggattgatttcacacagcttgtgtagaaggttgtccacaagttgtgaaatttgtcgaaaagctatttatctactatattatatgttttcaacatttaatgtgtacgaatggtaagcgccatttgctctttttttgtgttctataacagagaaagacgccattttctaagaaaaggagggacgtgccggaag
